(19) United States
(12) Patent Application Publication
(10) Pub. No.: US 2024/0415904 A1
(43) Pub. Date: Dec. 19, 2024

(54) STAPHYLOCOCCUS BACTERIOPHAGE AND USES THEREOF

(71) Applicant: BIOMX LTD., Nes Ziona (IL)

(72) Inventors: Lior Moshe Zelcbuch, Herzeliya (IL); Nufar Buchshtab, Nirim (IL); Yifat Elharar, Rehovot (IL); Julian Nicenboim, Gadera (IL); Tamar Lin, Ramat Gan (IL)

(21) Appl. No.: 18/289,842

(22) PCT Filed: May 12, 2022
(86) PCT No.: PCT/IB2022/054416

§ 371 Date: Nov. 7, 2023

Related U.S. Application Data
(60) Provisional application No. 63/216,002, filed on Jun. 29, 2021.
(60) Provisional application No. 63/187,484, filed on May 12, 2021.

(51) Int. Cl. A61K 35/76; A61P 31/04; C12N 7/00

(52) U.S. Cl. CPC A61K 35/76; A61P 31/04; C12N 7/00; C12N 2795/10021; C12N 2795/10032; C12N 2795/10221; C12N 2795/10232

(57) ABSTRACT

A composition comprising at least two different strains of isolated bacteriophages, each capable of infecting a bacteria of the species Staphylococcus aureus, wherein at least one of said at least two different strains of isolated bacteriophages has a genomic nucleic acid sequence at least 90% identical to one of the nucleic acid sequence as set forth in SEQ ID NOs: 1-7. Uses thereof are also disclosed.

### CROSS REFERENCE TO RELATED APPLICATIONS

[0001] This application is a U.S. National Stage Application filed under 35 U.S.C. § 371, based on International Patent Application No. PCT/IB2022/054416, filed on May 12, 2022, which claims the benefit of the filing dates of U.S. Provisional Application No. 63/187,484, filed on May 12, 2021, and 63/216,002, filed on Jun. 29, 2021, the entire contents of each of the above-referenced applications, including all drawings and sequence listings, are hereby incorporated herein by reference.

### SEQUENCE LISTING STATEMENT

[0002] The instant application contains a Sequence Listing which has been submitted electronically in ASCII format and is hereby incorporated by reference in its entirety. Said ASCII copy, created on May 11, 2022, is named 136923_00220_Sequence_listing.txt and is 791,898 bytes in size.

### FIELD AND BACKGROUND OF THE INVENTION

[0003] The present invention, in some embodiments thereof, relates to bacteriophage strains capable of infecting bacteria of the genus Staphylococcus, and more particularly bacteria of the species Staphylococcus aureus (SA) and Staphylococcus epidermis (SE) that are associated with skin disorders and disease, such as atopic dermatitis (AD) that was shown to be associated with increased skin colonization by Staphylococcus aureus. S. aureus contributes to AD pathogenesis through the release of virulence factors that affect the keratinocytes and immune cells. The relationship between AD and skin bacteria has led to different anti-microbial treatment approaches, including the use of bleach baths. Presently the use of bleach baths as an antibacterial therapy has shown mixed results, possibly due to varying concentrations of bleach used in different studies. Robust targeted and safe modulation of the microbiome may be more beneficial.

[0004] Phages are naturally occurring viruses that kill specific bacteria. Unlike antibiotics, phages are specific to the strain level and therefore, have unique advantages in terms of minimizing perturbation of the microbiome. They have no capability to infect mammalian cells and therefore, are considered safe.

### SUMMARY OF THE INVENTION

[0005] Unless otherwise defined, all technical and/or scientific terms used herein have the same meaning as commonly understood by one of ordinary skill in the art to which the invention pertains. Although methods and materials similar or equivalent to those described herein can be used in the practice or testing of embodiments of the invention, exemplary methods and/or materials are described below. In case of conflict, the patent specification, including definitions, will control. In addition, the materials, methods, and examples are illustrative only and are not intended to be necessarily limiting.

[0006] According to an aspect of the present invention there is provided a composition comprising at least two different strains of isolated bacteriophages, each capable of infecting a bacteria of the species Staphylococcus aureus, wherein at least one of the at least two different strains of isolated bacteriophages has a genomic nucleic acid sequence at least 90% (e.g., at least 91%, 92%, 93%, 94%, 95%, 96%, 97%, 98%, 99%, 99.2%, 99.4%, 99.6%, 99.8%, 99.9% or 100%) identical to one of the nucleic acid sequence as set forth in SEQ ID NOs: 1-7.

[0007] According to an aspect of the present invention there is provided a composition comprising at least two different strains of isolated bacteriophages, each capable of infecting a bacteria of the species Staphylococcus aureus, wherein at least one of the at least two different strains of isolated bacteriophages has a genomic nucleic acid sequence comprising a combined region of homolog essential genes, at least 90% (e.g., at least 91%, 92%, 93%, 94%, 95%, 96%, 97%, 98%, 99%, 99.2%, 99.4%, 99.6%, 99.8%, 99.9% or 100%) identical to the combined coding region of the essential genes of a bacteriophage selected from the bacteriophages listed in Table 2, as set forth in Example 7.

[0008] According to an aspect of the present invention there is provided an isolated bacteriophage capable of infecting bacteria of the species Staphylococcus aureus, wherein the bacteriophage has a genomic nucleic acid sequence at least 95% (e.g., at least 95%, 96%, 97%, 98%, 99%, 99.2%, 99.4%, 99.6%, 99.8%, 99.9% or 100%) identical to one of the nucleic acid sequences as set forth in SEQ ID NOs: 1-7.

[0009] According to an aspect of the present invention there is provided an isolated bacteriophage comprising at least 90% (e.g., at least 91%, 92%, 93%, 94%, 95%, 96%, 97%, 98%, 99%, 99.2%, 99.4%, 99.6%, 99.8%, 99.9% or 100%) identical genes (e.g., in the combined region) to the essential genes of a bacteriophage selected from the phages listed in Table 2, wherein the essential genes for the selected bacteriophage are as set forth in Example 7.

[0010] According to an aspect of the present invention, the non-essential genomic region of the selected phage comprises all regions that are not listed as essential genes for the selected bacteriophage as set forth in Example 7.

[0011] According to an aspect of the present invention there is provided a recombinant (non-wild-type) bacteriophage capable of (lytically) infecting a bacteria of the species Staphylococcus aureus (e.g., Staphylococcus aureus present in a Atopic dermatitis patient), said recombinant bacteriophage has: (i) a genomic nucleic acid sequence comprising at least 90% (e.g., at least 91%, 92%, 93%, 94%, 95%, 96%, 97%, 98%, 99%, 99.2%, 99.4%, 99.6%, 99.8%, 99.9%, or 100%) identical (e.g., in the combined coding region) to the essential genes of a bacteriophage selected from the bacteriophages listed in Table 2, as set forth in Example 7, and/or (ii) at least 200 bp of said recombinant bacteriophage non-essential genomic region deleted or otherwise mutated (e.g., for inactivating transposable elements).

[0012] According to an aspect of the present invention there is provided a recombinant (non-wild-type) bacteriophage capable of (lytically) infecting a bacteria of the species Staphylococcus aureus (e.g., Staphylococcus aureus present in a Atopic dermatitis patient), said recombinant bacteriophage has: (i) a genomic nucleic acid sequence at least 90% (e.g., at least 91%, 92%, 93%, 94%, 95%, 96%, 97%, 98%, 99%, 99.2%, 99.4%, 99.6%, 99.8%, or 99.9%) identical (e.g., in the combined coding region) to one of the nucleic acid sequence as set forth in SEQ ID NOs: 1-7, (ii) at least 90% (e.g., at least 91%, 92%, 93%, 94%, 95%, 96%, 97%, 98%, 99%, 99.2%, 99.4%, 99.6%, 99.8%, 99.9% or 100%) identical genes (e.g. in the combined region) to the essential genes of a bacteriophage selected from the bacteriophages listed in Table 2, as set forth in Example 7, and/or (iii) at least 200 bp of said recombinant bacteriophage non-essential genomic region deleted or otherwise mutated (e.g., for inactivating transposable elements).

[0013] According to an aspect of the present invention there is provided a recombinant (non-wild-type) bacteriophage capable of (lytically) infecting a bacteria of the species Staphylococcus aureus (e.g., Staphylococcus aureus present in a Atopic dermatitis patient), said recombinant bacteriophage has: (i) a genomic nucleic acid sequence at least 90% (e.g., at least 91%, 92%, 93%, 94%, 95%, 96%, 97%, 98%, 99%, 99.2%, 99.4%, 99.6%, 99.8%, 99.9%, or 100%) identical in the combined coding region to one of the nucleic acid sequence as set forth in SEQ ID NOs: 1-7, (ii) at least 90% (e.g., at least 91%, 92%, 93%, 94%, 95%, 96%, 97%, 98%, 99%, 99.2%, 99.4%, 99.6%, 99.8%, 99.9% or 100%) identical genes (e.g., in the combined region) to the essential genes of a bacteriophage selected from the bacteriophages listed in Table 2, as set forth in Example 7, and/or (iii) at least 200 bp of said recombinant bacteriophage non-essential genomic region deleted or otherwise mutated (e.g., for inactivating transposable elements).

[0014] According to an aspect of the present invention there is provided a method of treating a disease associated with a Staphylococcus aureus infection in a subject in need thereof, comprising administering to the subject a therapeutically effective amount of a composition comprising at least one isolated bacteriophage strain capable of infecting bacteria of the species Staphylococcus aureus, wherein the at least one bacteriophage strain has (i) a genomic nucleic acid sequence at least 95% (e.g., at least 95%, 96%, 97%, 98%, 99%, 99.2%, 99.4%, 99.6%, 99.8%, 99.9% or 100%) identical to one of the nucleic acid sequences set forth in SEQ ID NOs: 1-7, and/or (ii) at least 90% (e.g., at least 91%, 92%, 93%, 94%, 95%, 96%, 97%, 98%, 99%, 99.2%, 99.4%, 99.6%, 99.8%, 99.9% or 100%) identical genes (e.g., in the combined region) to the essential genes of a bacteriophage selected from the bacteriophages listed in Table 2, as set forth in Example 7; thereby treating the disease associated with a Staphylococcus aureus infection.

[0015] According to an aspect of the present invention there is provided a method of treating a disease associated with a Staphylococcus aureus infection in a subject in need thereof, comprising administering to the subject a therapeutically effective amount of the composition described herein, thereby treating the disease associated with a Staphylococcus aureus infection.

[0016] According to an aspect of the present invention there is provided a recombinant bacteriophage capable of infecting bacteria of the species Staphylococcus aureus, wherein the bacteriophage has (i) a genomic nucleic acid sequence at least 90% (e.g., at least 91%, 92%, 93%, 94%, 95%, 96%, 97%, 98%, 99%, 99.2%, 99.4%, 99.6%, 99.8%, 99.9% or 100%) identical to one of the nucleic acid sequences as set forth in SEQ ID NOs: 1-7, and/or (ii) at least 90% (e.g., at least 91%, 92%, 93%, 94%, 95%, 96%, 97%, 98%, 99%, 99.2%, 99.4%, 99.6%, 99.8%, 99.9% or 100%) identical genes (e.g., in the combined region) to the essential genes of a bacteriophage selected from the bacteriophages listed in Table 2, as set forth in Example 7; and wherein the bacteriophage is genetically modified such that the genome thereof comprises a heterologous sequence.

[0017] According to an aspect of the present invention there is provided a pharmaceutical composition comprising the recombinant bacteriophage described herein as the active agent, and a pharmaceutical carrier.

[0018] According to an embodiment of the invention, a first of the at least two different strains of isolated bacteriophages has a genomic nucleic acid sequence at least 90% (e.g., at least 91%, 92%, 93%, 94%, 95%, 96%, 97%, 98%, 99%, 99.2%, 99.4%, 99.6%, 99.8%, 99.9% or 100%) identical to the nucleic acid sequence as set forth in SEQ ID NO: 1 (and/or comprises the essential genes of phage STA48-1 as set forth in Example 7) and a second of the at least two different strains of isolated bacteriophages has a genomic nucleic acid sequence at least 90% (e.g., at least 91%, 92%, 93%, 94%, 95%, 96%, 97%, 98%, 99%, 99.2%, 99.4%, 99.6%, 99.8%, 99.9% or 100%) identical to the nucleic acid sequence as set forth in SEQ ID NO: 7 (and/or comprises the essential genes of phage STA48-7 as set forth in Example 7).

[0019] According to an embodiment of the invention, the composition comprises at least three different strains of isolated bacteriophages, wherein a third of the at least three different strains of isolated bacteriophages has a genomic nucleic acid sequence at least 90% (e.g., at least 91%, 92%, 93%, 94%, 95%, 96%, 97%, 98%, 99%, 99.2%, 99.4%, 99.6%, 99.8%, 99.9% or 100%) identical to the nucleic acid sequence as set forth in SEQ ID NO: 5 (and/or comprises the essential genes of phage STA48-5 as set forth in Example 7).

[0020] According to an embodiment of the invention, the composition comprises a bacteriophage or a combination of bacteriophages (e.g., a combination of 2, 3, or 4 bacteriophages), selected from:
[0021] (i) a bacteriophage having a genomic nucleic acid sequence at least 90% (e.g., at least 91%, 92%, 93%, 94%, 95%, 96%, 97%, 98%, 99%, 99.2%, 99.4%, 99.6%, 99.8%, 99.9% or 100%) identical to SEQ ID NO: 1 (and/or comprises the essential genes of phage STA48-1 as set forth in Example 7);
[0022] (ii) a bacteriophage having a genomic nucleic acid sequence at least 90% (e.g., at least 91%, 92%, 93%, 94%, 95%, 96%, 97%, 98%, 99%, 99.2%, 99.4%, 99.6%, 99.8%, 99.9% or 100%) identical to SEQ ID NO: 7 (and/or comprises the essential genes of phage STA48-7 as set forth in Example 7);
[0023] (iii) a bacteriophage having a genomic nucleic acid sequence at least 90% (e.g., at least 91%, 92%, 93%, 94%, 95%, 96%, 97%, 98%, 99%, 99.2%, 99.4%, 99.6%, 99.8%, 99.9% or 100%) identical to SEQ ID NO: 5 (and/or comprises the essential genes of phage STA48-5 as set forth in Example 7); and/or
[0024] (iv) a bacteriophage having a genomic nucleic acid sequence at least 90% (e.g., at least 91%, 92%, 93%, 94%, 95%, 96%, 97%, 98%, 99%, 99.2%, 99.4%, 99.6%, 99.8%, 99.9% or 100%) identical to SEQ ID NO: 4 (and/or comprises the essential genes of phage STA48-4 as set forth in Example 7);
[0025] e.g., wherein the bacteriophage or combination of bacteriophages is capable of infecting and lysing bacteria of one or more strains of Staphylococcus aureus, e.g., one or more strains of Staphylococcus aureus capable of infecting a human. Optionally, at least one bacteriophage in the combination is a recombinant or engineered bacterial phage not naturally existing in nature.

[0026] In certain embodiments, the composition comprises a combination of 3 bacteriophages of (i)-(iii), such as a combination of 3 bacteriophages of (i) a bacteriophage having a genomic nucleic acid sequence of SEQ ID NO: 1 or the essential genes of phage STA48-1 as set forth in Example 7; (ii) a bacteriophage having a genomic nucleic acid sequence of SEQ ID NO: 7 or the essential genes of phage STA48-7 as set forth in Example 7; and (iii) a bacteriophage having a genomic nucleic acid sequence of SEQ ID NO: 5 or the essential genes of phage STA48-5 as set forth in Example 7.

[0027] In certain embodiments, the composition comprises a combination of 4 bacteriophages of (i)-(iv), such as a combination of 4 bacteriophages of (i) a bacteriophage having a genomic nucleic acid sequence of SEQ ID NO: 1 or the essential genes of phage STA48-1 as set forth in Example 7; (ii) a bacteriophage having a genomic nucleic acid sequence of SEQ ID NO: 7 or the essential genes of phage STA48-7 as set forth in Example 7; (iii) a bacteriophage having a genomic nucleic acid sequence of SEQ ID NO: 5 or the essential genes of phage STA48-5 as set forth in Example 7; and (iv) a bacteriophage having a genomic nucleic acid sequence of SEQ ID NO: 4 or the essential genes of phage STA48-4 as set forth in Example 7.

[0028] According to an embodiment of the invention, the at least two different strains of isolated bacteriophages in combination target at least 60, 72, 84, 96 or 108 different strains of Staphylococcus aureus from the list in Example 1.

[0029] According to an embodiment of the invention, the at least two different strains of isolated bacteriophages in combination target at least 5, 6 or 7 different clonal complexes of Staphylococcus aureus from the list in FIG. 2.

[0030] According to an embodiment of the invention, the at least two different strains of isolated bacteriophages in combination target at least 14, 17, 20, 23, 26 or 29 different MLSTs of Staphylococcus aureus from the list in FIG. 3.

[0031] According to an embodiment of the invention, at least 98, 72, 76, 80, 84 or 88 different strains of Staphylococcus aureus from the list in Example 1 are targeted by each of the at least two different strains.

[0032] According to an embodiment of the invention, at least 5, 6 or 7 different clonal complexes of Staphylococcus aureus from the list in FIG. 2 are targeted by each of the at least two different strains.

[0033] According to an embodiment of the invention, at least 10, 12, 14, 17, 20 or 23 different MLSTs of Staphylococcus aureus from the list in FIG. 3 are targeted by each of the at least two different strains.

[0034] According to an embodiment of the invention, the composition comprises at least three different strains of isolated bacteriophages, each capable of infecting a bacteria of the species Staphylococcus aureus, wherein each of the at least three (different strains of isolated bacteriophages has a genomic nucleic acid sequence at least 90% (e.g., at least 91%, 92%, 93%, 94%, 95%, 96%, 97%, 98%, 99%, 99.2%, 99.4%, 99.6%, 99.8%, 99.9% or 100%) identical to one of the nucleic acid sequence as set forth in SEQ ID NOs: 1-7, and/or comprises the essential genes for a bacteriophage as specified in Example 7, wherein the at least three different strains of isolated bacteriophages in combination target (i) at least 80, 85, 90, 95, 100, 105 or 110 different strains of Staphylococcus aureus from the list in Example 1; and/or (ii) at least 14, 17, 20, 23, 26 or 29 different MLSTs of Staphylococcus aureus from the list in FIG. 3; and/or (iii) at least 5, 6 or 7 different clonal complexes of Staphylococcus aureus from the list in FIG. 2.

[0035] According to an embodiment of the invention, the composition comprises at least three different strains of isolated bacteriophages, each capable of infecting a bacteria of the species Staphylococcus aureus, wherein each of the at least three different strains of isolated bacteriophages has a genomic nucleic acid sequence at least 90% (e.g., at least 91%, 92%, 93%, 94%, 95%, 96%, 97%, 98%, 99%, 99.2%, 99.4%, 99.6%, 99.8%, 99.9% or 100%) identical to one of the nucleic acid sequence as set forth in SEQ ID Nos: 1-7, and/or comprises the essential genes for a bacteriophage as specified in Example 7, wherein (i) at least 65, 70, 75 or 80 different strains of Staphylococcus aureus from the list in Example 1; and/or (ii) at least 10, 12, 14, 17, 20 or 23 different MLSTs of Staphylococcus aureus from the list in FIG. 3 are targeted by each of the at least three different strains; and/or (iii) at least 5, 6 or 7 different clonal complexes of Staphylococcus aureus from the list in FIG. 2.

[0036] According to an embodiment of the invention, the at least one bacteriophage is genetically modified such that the genome thereof comprises a heterologous sequence.

[0037] According to an embodiment of the invention, the heterologous sequence encodes a therapeutic agent or a diagnostic agent.

[0038] According to an embodiment of the invention, the composition comprises no more than 7 different bacteriophage strains.

[0039] According to an embodiment of the invention, the heterologous sequence encodes a therapeutic agent or a diagnostic agent.

[0040] According to an embodiment of the invention, the therapeutic agent comprises an immune modulating agent.

[0041] According to an embodiment of the invention, the pharmaceutical composition is formulated for topical delivery, oral delivery or rectal delivery.

[0042] According to an embodiment of the invention, the disease is a Atopic dermatitis (AD).

[0043] According to an embodiment of the invention, the administering comprises topically administering or orally administering or rectally administering.

[0044] According to an embodiment of the invention, the method further comprises determining the strain of Staphylococcus aureus colonizing the subject prior to the administering.

[0045] According to an embodiment of the invention, the at least one bacteriophage strain is genetically modified such that the genome thereof comprises a heterologous sequence.

[0046] According to an embodiment of the invention, the heterologous sequence encodes a therapeutic agent or a diagnostic agent.

[0047] According to an embodiment of the invention, the therapeutic agent comprises an immune modulating agent.

[0048] Additional aspects and embodiments of the invention described here are provided below in the numbered paragraphs.

[0049] 1. A composition comprising at least two different strains of isolated bacteriophages, each capable of (lytically) infecting a bacteria of the species Staphylococcus aureus (e.g., Staphylococcus aureus present in an Atopic Dermatitis patient), wherein at least one of said at least two different strains of isolated bacteriophages has (i) a genomic nucleic acid sequence at least 90% (e.g., at least 91%, 92%, 93%, 94%, 95%, 96%, 97%, 98%, 99%, 99.2%, 99.4%, 99.6%, 99.8%, 99.9% or 100%) identical (e.g., in the combined coding region) to one of the nucleic acid sequence as set forth in SEQ ID NOs: 1-7, and/or (ii) at least 90% (e.g., at least 91%, 92%, 93%, 94%, 95%, 96%, 97%, 98%, 99%, 99.2%, 99.4%, 99.6%, 99.8%, 99.9% or 100%) identical genes (e.g., in the combined region) to the essential genes of a bacteriophage selected from the bacteriophages listed in Table 2, as set forth in Example 7; and
[0050] wherein optionally, said at least two different strains of isolated bacteriophages have synergistic effect, based on either (i) time-to-mutant (TTM) that is at least 10%, 20%, 30%, 40%, 50%, 60%, 70%, or 80% above the longest individual phage TTM with respect to said bacteria, or (ii) normalized area under the curve for OD600-time plot (AUC) that is at least 10%, 20%, 30%, 40%, 50%, 60%, 70%, 80% or 90% smaller than the smallest individual phage normalized area under the curve with respect to said bacteria (or a mixture of more than one of said bacteria).

[0051] 2. The composition of paragraph 1, wherein a first of said at least two different strains of isolated bacteriophages has a genomic nucleic acid sequence at least 90% (e.g., at least 91%, 92%, 93%, 94%, 95%, 96%, 97%, 98%, 99%, 99.2%, 99.4%, 99.6%, 99.8%, 99.9% or 100%) identical (e.g., in the combined coding region) to the nucleic acid sequence as set forth in SEQ ID NO: 1 and a second of said at least two different strains of isolated bacteriophages has a genomic nucleic acid sequence at least 90% (e.g., at least 91%, 92%, 93%, 94%, 95%, 96%, 97%, 98%, 99%, 99.2%, 99.4%, 99.6%, 99.8%, 99.9% or 100%) identical (e.g., in the combined coding region) to the nucleic acid sequence as set forth in SEQ ID NO: 7.

[0052] 3. The composition of paragraph 2, comprising at least three different strains of isolated bacteriophages, wherein a third of said at least three different strains of isolated bacteriophages has a genomic nucleic acid sequence at least 90% (e.g., at least 91%, 92%, 93%, 94%, 95%, 96%, 97%, 98%, 99%, 99.2%, 99.4%, 99.6%, 99.8%, 99.9% or 100%) identical (e.g., in the combined coding region) to the nucleic acid sequence as set forth in SEQ ID NO: 5.

[0053] 4. The composition of any one of paragraph 1-3, comprising:
[0054] (i) a bacteriophage having a genomic nucleic acid sequence at least 90% (e.g., at least 91%, 92%, 93%, 94%, 95%, 96%, 97%, 98%, 99%, 99.2%, 99.4%, 99.6%, 99.8%, 99.9% or 100%) identical (e.g., in the combined coding region) to SEQ ID NO: 1;
[0055] (ii) a bacteriophage having a genomic nucleic acid sequence at least 90% (e.g., at least 91%, 92%, 93%, 94%, 95%, 96%, 97%, 98%, 99%, 99.2%, 99.4%, 99.6%, 99.8%, 99.9% or 100%) identical (e.g., in the combined coding region) to SEQ ID NO: 7;
[0056] (iii) a bacteriophage having a genomic nucleic acid sequence at least 90% (e.g., at least 91%, 92%, 93%, 94%, 95%, 96%, 97%, 98%, 99%, 99.2%, 99.4%, 99.6%, 99.8%, 99.9% or 100%) identical (e.g., in the combined coding region) to SEQ ID NO: 5; and,
[0057] (iv) a bacteriophage having a genomic nucleic acid sequence at least 90% (e.g., at least 91%, 92%, 93%, 94%, 95%, 96%, 97%, 98%, 99%, 99.2%, 99.4%, 99.6%, 99.8%, 99.9% or 100%) identical (e.g., in the combined coding region) to SEQ ID NO: 4.

[0058] 5. The composition of any one of paragraphs 1-4, wherein said at least two different strains of isolated bacteriophages in combination target (a) at least 60, 72, 84, 96 or 108 different strains of Staphylococcus aureus from the list of about 120 bacterial isolates from injured human skin in Example 1 (“the list in Example 1”); and/or (b) one or more of the Staphylococcus aureus strain in Table 6

[0059] 6. The composition of any one of the paragraphs 1-5, wherein at least 80 or 100 different strains of Staphylococcus aureus from the list in Example 1 and Table 6, and/or at least 20 or 25 different MLSTs of Staphylococcus aureus from the list in FIG. 3 and/or at least 5 different clonal complexes of Staphylococcus aureus from the list in FIG. 2 are targeted by each of said at least two different strains.

[0060] 7. The composition of any one of paragraphs 1-6, comprising at least three different strains of isolated bacteriophages, each capable of infecting a bacteria of the species Staphylococcus aureus, wherein each of said at least three different strains of isolated bacteriophages has a genomic nucleic acid sequence at least 90% (e.g., at least 91%, 92%, 93%, 94%, 95%, 96%, 97%, 98%, 99%, 99.2%, 99.4%, 99.6%, 99.8%, 99.9% or 100%) identical (e.g., in the combined coding region) to one of the nucleic acid sequence as set forth in SEQ ID NOs: 1-7, wherein said at least three different strains of isolated bacteriophages in combination target (i) at least 100 different strains of Staphylococcus aureus from the list in Example 1 and Table 6; and/or (ii) at least 25 different MLSTs of Staphylococcus aureus from the list in FIG. 3; and/or (iii) at least 5 different clonal complexes of Staphylococcus aureus from the list in FIG. 2.

[0061] 8. The composition of any one of paragraphs 1-7, comprising at least three different strains of isolated bacteriophages, each capable of infecting a bacteria of the species Staphylococcus aureus, wherein each of said at least three different strains of isolated bacteriophages has a genomic nucleic acid sequence at least 90% (e.g., at least 91%, 92%, 93%, 94%, 95%, 96%, 97%, 98%, 99%, 99.2%, 99.4%, 99.6%, 99.8%, 99.9% or 100%) identical (e.g., in the combined coding region) to one of the nucleic acid sequence as set forth in SEQ ID NOs: 1-7, wherein (i) at least 90 different strains of Staphylococcus aureus from the list in Example 1 and Table 6, and/or (ii) at least 25 different MLSTs of Staphylococcus aureus from the list in FIG. 3 and/or (iii) at least 5 different clonal complexes of Staphylococcus aureus from the list in FIG. 2 are targeted by at least two of said at least three different strains.

[0062] 9. The composition of any one of paragraphs 1-8, wherein at least one bacteriophage of said at least two different strains of isolated bacteriophages is genetically modified such that (a) the genome thereof comprises a heterologous sequence; and/or (b) a transposable element (TE) thereof is inactive; optionally, said TE is inactivated by a mutation (e.g., deletion) that inactivates (a) a transposase of the TE, and/or (b) a structural element of the TE required for transposition.

[0063] 10. The composition of paragraph 9, wherein (a) said heterologous sequence encodes a therapeutic agent or a diagnostic agent; and/or (b) said transposable element is any one listed in Table 7.

[0064] 11. The composition of any one of paragraphs 1-10, comprising no more than 10, e.g., no more than 7, different bacteriophage strains.

[0065] 12. The composition of any one of paragraphs 1-11, being formulated for topical delivery, oral delivery, rectal delivery or delivery by inhalation.

[0066] 13. A recombinant bacteriophage capable of infecting bacteria of the species Staphylococcus aureus, wherein said bacteriophage has a genomic nucleic acid sequence at least 90% (e.g., at least 91%, 92%, 93%, 94%, 95%, 96%, 97%, 98%, 99%, 99.2%, 99.4%, 99.6%, 99.8%, 99.9% or 100%) identical (e.g., in the combined coding region) to one of the nucleic acid sequences as set forth in SEQ ID NOs: 1-7, and wherein said bacteriophage is genetically modified such that the genome thereof comprises a heterologous sequence; and/or lacks a native transposon sequence present in said bacteriophage prior to said bacteriophage is genetically modified.

[0067] 14. The recombinant bacteriophage of paragraph 13, wherein said heterologous sequence encodes a therapeutic agent or a diagnostic agent.

[0068] 15. The recombinant bacteriophage of paragraph 14, or the composition of paragraph 10, wherein said therapeutic agent comprises an immune modulating agent.

[0069] 16. A pharmaceutical composition comprising the recombinant bacteriophage of any one of paragraph 13-15 as the active agent, and a pharmaceutical carrier.

[0070] 17. The pharmaceutical composition of paragraph 16, being formulated for topical delivery, oral delivery, rectal delivery or delivery by inhalation.

[0071] 18. An isolated bacteriophage capable of (lytically) infecting bacteria of the species Staphylococcus aureus (e.g., Staphylococcus aureus present in an Atopic Dermatitis patient), wherein said bacteriophage has a genomic nucleic acid sequence at least 95% (e.g., at least 95%, 96%, 97%, 98%, 99%, 99.2%, 99.4%, 99.6%, 99.8%, 99.9% or 100%) identical (e.g., in the combined coding region) to one of the nucleic acid sequences as set forth in SEQ ID NOs: 1-7.

[0072] 19. A method of treating a disease associated with a Staphylococcus aureus infection in a subject in need thereof (e.g., a subject having Atopic Dermatitis), comprising administering to the subject a therapeutically effective amount of a composition comprising at least one isolated bacteriophage strain capable of infecting bacteria of the species Staphylococcus aureus causing the infection, wherein said at least one bacteriophage strain has a genomic nucleic acid sequence at least 95% (e.g., at least 95%, 96%, 97%, 98%, 99%, 99.2%, 99.4%, 99.6%, 99.8%, 99.9% or 100%) identical (e.g., in the combined coding region) to one of the nucleic acid sequences set forth in SEQ ID NOs: 1-7, thereby treating the disease associated with a Staphylococcus aureus infection.

[0073] 20. A method of treating a disease (e.g., Atopic Dermatitis) associated with a Staphylococcus aureus infection in a subject in need thereof, comprising administering to the subject a therapeutically effective amount of the composition of any one of paragraphs 1-12, thereby treating the disease associated with a Staphylococcus aureus infection.

[0074] 21. The method of paragraph 19 or 20, wherein the disease is Atopic Dermatitis (AD); or the disease is further associated with or characterized by Staphylococcus epidermidis infection.

[0075] 22. The method of any one of paragraphs 19-21, wherein said administering comprises topically administering, orally administering or rectally administering.

[0076] 23. The method of any one of paragraphs 19-22, wherein said composition comprises no more than 7 different bacteriophage strains.

[0077] 24. The method of any one of paragraphs 19-23, further comprising identifying the strain of Staphylococcus aureus colonizing the subject prior to the administering.

[0078] 25 The method of any one of paragraphs 19-24, wherein said at least one bacteriophage strain is genetically modified such that (a) the genome thereof comprises a heterologous sequence; and/or (b) the genome thereof either comprises inactive or lacks transposable elements.

[0079] 26. The method of paragraph 25, wherein said heterologous sequence encodes a therapeutic agent or a diagnostic agent.

[0080] 27. The method of paragraph 26, wherein said therapeutic agent comprises an immune modulating agent.

[0081] 28. The method of any one of paragraphs 19-27, wherein the subject has been treated with, or is to be further treated with an antibiotic effective against Staphylococcus aureus (e.g., Staphylococcus aureus present in an Atopic Dermatitis patient).

[0082] 29. The method of any one of paragraphs 19-27, further comprising treating the subject with an antibiotic effective against Staphylococcus aureus (e.g., Staphylococcus aureus present in an Atopic Dermatitis patient).

[0083] It should be understood that any one embodiment of the invention described herein, including those described only in the examples or claims, or numbered paragraphs herein, can be combined with any one or more additional embodiments of the invention, unless such combination is improper or expressly disclaimed.

### BRIEF DESCRIPTION OF THE SEVERAL VIEWS OF THE DRAWINGS

[0084] Some embodiments of the invention are herein described, by way of example only, with reference to the accompanying drawings. With specific reference now to the drawings in detail, it is stressed that the particulars shown are by way of example and for purposes of illustrative discussion of embodiments of the invention. In this regard, the description taken with the drawings makes apparent to those skilled in the art how embodiments of the invention may be practiced.

[0085] In the drawings:

[0086] FIG. 1 is a distance matrix summarizing the % sequence homology (based on local BLAST) among the isolated phages.

[0087] FIG. 2 presents the host range of the isolated phages as profiled according to the hosts bacteria clonal complex (CC). A CC instance where at least on bacterial member was found to be infected by the corresponding phage was marked “+.”

[0088] FIG. 3 presents the host range of the isolated phages as profiled according to the hosts bacteria multilocus sequence typing (MLST). An MLST instance where at least on bacterial member was found to be infected by the corresponding phage was marked “+.”

[0089] FIG. 4 presents S. aureus Phylogenetic Tree, based on over 10,000 known sequences, and applicant's assembly of approximately 120 isolates marked with asterisks. The isolates are distributed across the Staphylococcus aureus phylogenetic tree.

[0090] FIGS. 5A to 5B present growth curves of in vitro liquid infection of Staphylococcus aureus strains with individual bacteriophage or cocktail and the synergistic performance of phage mixtures in comparison to the TTM observed for each phage member separately.

[0091] FIG. 6 presents growth curves of two bacterial strains with different sensitivity patterns (A) SA strain 527 (upper three charts) is sensitive to all three phages. (B) SA strain 418 (lower three charts) is sensitive only to STA48-7. Leftmost two charts present the OD curves for infection at early-log phase, middle two charts present the OD curves for infection at mid-log phase, and rightmost two charts present the OD curves for infection at stationary phase. NPC; no phage control.

### DESCRIPTION OF SPECIFIC EMBODIMENTS OF THE INVENTION

[0092] The present invention, in some embodiments thereof, relates to bacteriophage strains capable of infecting bacteria of the genus Staphylococcus and more particularly bacteria of the species Staphylococcus aureus.

[0093] Before explaining at least one embodiment of the invention in detail, it is to be understood that the invention is not necessarily limited in its application to the details set forth in the following description or exemplified by the Examples. The invention is capable of other embodiments or of being practiced or carried out in various ways.

[0094] The present inventors have isolated novel bacteriophage strains characterized by having a high specificity to one or more Staphylococcus aureus strains. The disclosed bacteriophage are lytic, and as such do not have any capacity to integrate into the DNA of their bacterial host. Such bacteriophages bring about immediate target bacterial eradication through lysis after hijacking the host protein expression machinery to manufacture needed phage protein components.

[0095] The present inventors sought to combine particular phage strains and provide them as a cocktail which is capable of lysing a myriad of Staphylococcus aureus strains in a single dose. The cocktails can serve as an off-the-shelf therapeutic for the treatment of Atopic dermatitis (AD), which is known to be associated with Staphylococcus aureus infections. Furthermore, it is envisaged that the cocktails will have high therapeutic efficacy for treating AD at the individual level, since each individual can be infected by a wide range of Staphylococcus aureus strains.

[0096] The combinations disclosed herein are typically synergistic (e.g., synergistic combination) with respect to their inhibitory effect on the target bacteria. This may be quantitated by measuring the time taken to mutation (TTM), i.e., the time taken for a bacteria to mutate and overcome the inhibitory effect of a phage. When two phages X and Y are known to infect a target bacteria strain H, the TTM of each phage separately as well as the TTM of their combination is measured under same growth conditions. The synergistic redundancy effect appears when the TTM of combination [X, Y] is longer than that of both X and Y.

[0097] In certain embodiments, the at least two different strains of isolated bacteriophages have synergistic redundancy effect, based on time-to-mutant (TTM) that is at least 10%, 20%, 30%, 40%, 50%, 60%, 70%, or 80% above the longest individual phage TTM with respect to the bacteria using which the TTM is measured.

[0098] Alternatively, or in addition, in certain embodiments, the at least two different strains of isolated bacteriophages have synergistic redundancy effect, based on normalized area under the curve for OD600-time plot (AUC) that is at least 10%, 20%, 30%, 40%, 50%, 60%, 70%, 80% or 90% smaller than the smallest individual phage normalized area under the curve with respect to said bacteria (or a mixture of more than one of said bacteria).

[0099] Here, when the bacterial growth in the presence of a bacteriophage (or combination thereof) is plotted as OD600 over time, an area under the curve can be calculated for each phage (or combination thereof). Such AUC, when normalized against no phage control AUC, can be compared to assess synergistic suppression of bacteria growth by phage combinations as compared to individual phages in the combination.

[0100] Without being bound to theory, the synergy may be derived from different mechanism of infection used by the two phages X and Y. According to certain embodiments of the present invention, the synergic TTM increase may be predicted by the “at least 2 phage % coverage,” and/or the “at least 3 phage % coverage,” and/or the “at least 4 phage % coverage,” and/or the “at least 5 phage % coverage” trait of a phage combination.

[0101] Thus, according to a first aspect of the present invention, there is provided an isolated bacteriophage capable of infecting bacteria of the species Staphylococcus aureus, wherein the bacteriophage has a genomic nucleic acid sequence at least 95% identical to one of the nucleic acid sequences as set forth in SEQ ID NOs: 1-7. Optionally, the bacteriophage is not naturally existing and comprises at least one heterologous engineered mutation.

[0102] As used herein, the term “bacteriophage” and “phage” are used interchangeably and refer to an isolated virus that is capable of infecting a bacterium. Typically, a phage will be characterized by: 1) the nature of the nucleic acids that make up its genome, e.g., DNA, RNA, single-stranded or double-stranded; 2) the nature of its infectivity, e.g., lytic or temperate; and 3) the particular Staphylococcus aureus subspecies that it infects (and in certain instances the particular strain of that Staphylococcus aureus subspecies). This aspect is known as “host range.”

[0103] As used herein, the phrases “isolated bacteriophage,” “isolate” or grammatical equivalents refer to a bacteriophage which is removed from its natural environment (e.g. removed from bacteria which it typically infects). In one embodiment, the isolated bacteriophage is removed from cellular material and/or other elements that naturally exist in the source clinical or environmental sample. The term isolated bacteriophages includes such phages isolated from human or animal patients (“clinical isolates” or “clinical variants”) and such phages isolated from the environment (“environmental isolates”).

[0104] In one embodiment, the bacteriophages are lytic.

[0105] The term “lytic bacteriophage” refers to a bacteriophage that infects a bacterial host and causes that host to lyse without incorporating the phage nucleic acids into the host genome. A lytic bacteriophage is typically not capable of reproducing using the lysogenic cycle.

[0106] As used herein, the phrase “phage strain” refers to the deposited or sequenced phage, as described herein.

[0107] The bacteriophage and certain infected host bacteria have been deposited at the Polish Collection of micororganisms PCM), Institute of Immunology and Experimental Therapy, Polish Academy of Sciences, Ul. Weigla 12, 53-114 Wroclaw, Poland with the deposit numbers provided in Table 2.1 and Table 6, herein below.

[0108] The term “Staphylococcus aureus” relates to a species of bacteria of the Staphylococcus genus. Staphylococcus bacterium are Gram-positive bacteria in the family Staphylococcaceae from the order Bacillales. Under the microscope, they appear spherical (cocci), and form in grape-like clusters. Staphylococcus species are facultative anacrobic organisms (capable of growth both aerobically and anaerobically). It will be appreciated that the term “Staphylococcus aureus” includes bacteria that are currently classified or will be reclassified as Staphylococcus aureus bacteria.

[0109] Exemplary strains of Staphylococcus aureus that are infected by the phage strains of the present invention are those that are found in human specimens (e.g., skin, intact or damaged such in burns, and wounds).

[0110] In some embodiments, the bacteriophages provided herein are capable of lysing deleterious Staphylococcus aureus bacteria that induce immune and/or inflammatory response(s).

[0111] In a particular embodiment, the phages described herein are capable of infecting at least one, two, three, four, five, six, seven, eight, nine or more Staphylococcus aureus strains (e.g. from the list in Example 1 and/or table 6) that infect a subject (e.g. AD patient) and/or at least one, two, three, four, five, six, seven, eight, nine or more CCs of Staphylococcus aureus from the list in FIG. 2 and/or at least one, two, three, four, five, six, seven, eight, nine or more MLSTs of Staphylococcus aureus from the list in FIG. 3.

[0112] In a particular embodiment, the phages described herein are capable of infecting at least one, two, three, four, five, six, seven, eight, nine or more Staphylococcus aureus strains (e.g. from the list in Example 1 and/or table 6) that infect a subject (e.g. AD patient) and/or at least one, two, three, four, five, six, seven, eight, nine or more CCs of Staphylococcus aureus from the list in FIG. 2 and/or at least one, two, three, four, five, six, seven, eight, nine or more MLSTs of Staphylococcus aureus from the list in FIG. 3 present in the subject (e.g., skin, intact or damaged such in burns, and wounds).

[0113] In a particular embodiment, the phages described herein are capable of infecting at least one, two, three, four, five, six, seven, eight, nine or more Staphylococcus aureus strains (e.g. from the list in Example 1 and/or table 6) that infect a subject (e.g. AD patient) and/or at least one, two, three, four, five, six, seven, eight, nine or more CCs of Staphylococcus aureus from the list in FIG. 2 and/or at least one, two, three, four, five, six, seven, eight, nine or more MLSTs of Staphylococcus aureus from the list in FIG. 3 infecting subjects such as AD patients.

[0114] According to a particular embodiment, the phages described herein are capable of infecting Staphylococcus aureus bacterial strains having a specific capsule locus type.

[0115] Also contemplated are progeny of the phages having a genomic nucleic acid as set forth in SEQ ID NOs: 1-7, wherein the progeny is capable of infecting the same subspecies (or even strain) of Staphylococcus aureus as that the parent bacteriophage having one of the above set forth genomic nucleic acid sequence infects. Such progeny may have genomes having a sequence at least 85% identical, at least 90% identical, at least 91% identical, at least 92% identical, at least 93% identical, at least 94% identical, at least 95% identical, 96% identical, 97% identical 98% identical, or 99% identical to the genome of the parent bacteriophage.

[0116] As used herein, the term “or progeny of the bacteriophage” refers to bacteriophages stemming from or derived from the strains identified herein.

[0117] Also contemplated are functional homologs of those that have a genomic nucleic acid sequence as set forth in SEQ ID NOs: 1-7, wherein the functionally homologous bacteriophage is capable of infecting essentially the same subspecies (or even strain) of Staphylococcus aureus as that which the bacteriophage having one of the above set forth genomic nucleic acid sequence infects.

[0118] As used herein “functional homolog” or “functionally homologous” or “variant” or grammatical equivalents as used herein refer to a bacteriophage with a genomic nucleic acid sequence different than that of the sequenced bacteriophage (i.e., at least one mutation) resulting in a bacteriophage that is endowed with substantially the same ensemble of biological activities (+/−10%, 20%, 40%, 50%, 60% when tested under the same conditions) as that of the sequenced bacteriophage and can be classified as infecting essentially the same strain or subspecies of bacteria based on known methods of species/strain classifications.

[0119] A bacteriophage “infects” bacteria if it either causes the bacteria to lyse or integrates its nucleic acid sequence into the bacterial genome.

[0120] According to a particular embodiment, the bacteriophage disclosed herein lyse their target bacteria.

[0121] According to a particular embodiment, the bacteriophage capability to infect (also termed “to target”) their target bacteria is measured using a solid assay or a liquid assay.

[0122] According to some embodiments, the genomic nucleic acid sequence of the bacteriophages described herein is at least about 85%, at least about 90%, at least about 91%, at least about 92%, at least about 93%, at least about 94%, at least about 95%, at least about 96% least about 97%, at least about 97.1%, at least about 97.2%, at least about 97.3%, at least about 97.4%, at least about 97.5%, at least about 97.6%, at least about 97.7%, at least about 97.8%, at least about 97.9%, at least about 98%, at least about 98.1%, at least about 98.2%, at least about 98.3%, at least about 98.4%, at least about 98.5%, at least about 98.6%, at least about 98.7%, at least about 98.8%, at least about 98.9%, at least about 99%, at least about 99.1%, at least about 99.2%, at least about 99.3%, at least about 99.4%, at least about 99.5%, at least about 99.6%, at least about 99.7%, at least about 99.8%, at least about 99.8%, at least about 99.9%, at least about 99.95% 99.95%, at least about 99.99%, or more identical to the (i) genomic sequence of the genomic sequences as set forth in SEQ ID NOs: 1, 2, 3, 4, 5, 6 or 7; and/or (ii) combined region of the essential genes of a bacteriophage selected from the bacteriophages listed in Table 2, as set forth in Example 7.

[0123] In particular, the bacteriophage has a genomic nucleic acid sequence at least 95% identical (% homologous) to the nucleic acid sequence as set forth in SEQ ID NOs: 1, 2, 3, 4, 5, 6 or 7; and/or (ii) combined region of the essential genes of a bacteriophage selected from the bacteriophages listed in Table 2, as set forth in Example 7.

[0124] According to a specific embodiment, the bacteriophage has a genomic nucleic acid sequence at least 95% identical (% homologous) to the full length nucleic acid sequence as set forth in SEQ ID NOs: 1, 2, 3, 4, 5, 6 or 7.

[0125] According to a specific embodiment, the bacteriophage comprises at least 90% (e.g., at least 91%, 92%, 93%, 94%, 95%, 96%, 97%, 98%, 99%, 99.2%, 99.4%, 99.6%, 99.8%, 99.9% or 100%) identical genes (e.g., in the combined region) to the essential genes of a bacteriophage selected from the bacteriophages listed in Table 2, wherein the essential genes are genes as set forth for the selected bacteriophage in Example 7.

[0126] As used herein, “percent homology,” “percent identity,” “sequence identity” or “identity” or grammatical equivalents as used herein in the context of two nucleic acid or polypeptide sequences includes reference to the residues in the two sequences which are the same when aligned. When percentage of sequence identity is used in reference to proteins it is recognized that residue positions which are not identical often differ by conservative amino acid substitutions, where amino acid residues are substituted for other amino acid residues with similar chemical properties (e.g. charge or hydrophobicity) and therefore do not change the functional properties of the molecule. Where sequences differ in conservative substitutions, the percent sequence identity may be adjusted upwards to correct for the conservative nature of the substitution. Sequences which differ by such conservative substitutions are considered to have “sequence similarity” or “similarity.” Means for making this adjustment are well-known to those of skill in the art. Typically this involves scoring a conservative substitution as a partial rather than a full mismatch, thereby increasing the percentage sequence identity. Thus, for example, where an identical amino acid is given a score of 1 and a non-conservative substitution is given a score of zero, a conservative substitution is given a score between zero and 1. The scoring of conservative substitutions is calculated, e.g., according to the algorithm of Henikoff S and Henikoff J G. [Amino acid substitution matrices from protein blocks. Proc. Natl. Acad. Sci. U.S.A. 1992, 89 (22): 10915-9].

[0127] Percent identity can be determined using any homology comparison software, including for example, the BlastN software of the National Center of Biotechnology Information (NCBI) such as by using default parameters.

[0128] Other exemplary sequence alignment programs that may be used to determine % homology or identity between two sequences include, but are not limited to, the FASTA package (including rigorous (SSEARCH, LALIGN, GGSEARCH and GLSEARCH) and heuristic (FASTA, FASTX/Y, TFASTX/Y and FASTS/M/F) algorithms, the EMBOSS package (Needle, stretcher, water and matcher), the BLAST programs (including, but not limited to BLASTN, BLASTX, TBLASTX, BLASTP, TBLASTN), megablast and BLAT. In some embodiments, the sequence alignment program is BLASTN. For example, 95% homology refers to 95% sequence identity determined by BLASTN, by combining all non-overlapping alignment segments (BLAST HSPs), summing their numbers of identical matches and dividing this sum with the length of the shorter sequence.

[0129] In some embodiments, the sequence alignment program is a basic local alignment program, e.g., BLAST. In some embodiments, the sequence alignment program is a pairwise global alignment program. In some embodiments, the pairwise global alignment program is used for protein-protein alignments. In some embodiments, the pairwise global alignment program is Needle. In some embodiments, the sequence alignment program is a multiple alignment program. In some embodiments, the multiple alignment program is MAFFT. In some embodiments, the sequence alignment program is a whole genome alignment program. In some embodiments, the whole genome alignment is performed using BLASTN. In some embodiments, BLASTN is utilized without any changes to the default parameters.

[0130] According to some embodiments of the invention, the identity is a global identity, i.e., an identity over the entire nucleic acid sequences of the invention and not over portions thereof.

[0131] According to an additional or alternative embodiment, a functional homolog is determined as the average nucleotide identity (ANI), which detects the DNA conservation of the core genome (Konstantinidis K and Tiedje J M, 2005, Proc. Natl. Acad. Sci. USA 102:2567-2592). In some embodiments, the ANI between the functional homolog and the deposited bacteriophage (or that having a genome as set forth in any one of SEQ ID NO: 1, 2, 3, 4, 5, 6 or 7 is of at least about 95%, at least about, 96%, at least about 97%, at least about 98%, at least about 99%, at least about 99.1%, at least about 99.5%, at least about 99.6%, at least about 99.7%, at least about 99.8%, at least about 99.9% or more.

[0132] According to an additional or alternative embodiment, a functional homolog is determined by the degree of relatedness between the functional homolog and the bacteriophage having a genome as set forth in any one of SEQ ID NO: 1, 2, 3, 4, 5, 6 or 7 determined as the Tetranucleotide Signature Frequency Correlation Coefficient, which is based on oligonucleotide frequencies (Bohlin J. et al. 2008, BMC Genomics, 9:104). In some embodiments, the Tetranucleotide Signature Frequency Correlation coefficient between the variant and the bacteriophage having a genome as set forth in any one of SEQ ID NO: 1, 2, 3, 4, 5, 6 or 7 is of about 0.99, 0.999 or more.

[0133] According to an additional or alternative embodiment, the degree of relatedness between the functional homolog and the bacteriophage having a genome as set forth in any one of SEQ ID NO: 1, 2, 3, 4, 5, 6 or 7 is determined as the degree of similarity obtained when analyzing the genomes of the parent and of the variant bacteriophage by Pulsed-field gel electrophoresis (PFGE) using one or more restriction endonucleases. The degree of similarity obtained by PFGE can be measured by the Dice similarity coefficient. In some embodiments, the Dice similarity coefficient between the variant and the bacteriophage having a genome as set forth in any one of SEQ ID NO: 1, 2, 3, 4, 5, 6 or 7 is of at least about 96%, at least about 97%, at least about 98%, at least about 99%, at least about 99.1%, at least about 99.5%, at least about 99.6%, at least about 99.7%, at least about 99.8%, at least about 99.9% or more.

[0134] According to an additional or alternative embodiment, the degree of relatedness between the functional homolog and the bacteriophage having a genome as set forth in any one of SEQ ID NO: 1, 2, 3, 4, 5, 6 or 7 is determined by the Pearson correlation coefficient obtained by comparing the genetic profiles of both phages obtained by repetitive extragenic palindromic element-based PCR (REP-PCR) (see e.g. Chou and Wang, Int J Food Microbiol. 2006, 110:135-48). In some embodiments, the Pearson correlation coefficient obtained by comparing the REP-PCR profiles of the variant and the above described (e.g. deposited phage) is of at least about 0.99, at least about 0.999 or more-see for example bmcmicrobioldotbiomedcentraldotcom/articles/10.1186/s12866-020-01770-2.

[0135] According to an additional or alternative embodiment, the degree of relatedness between the functional homolog and the bacteriophage having a genome as set forth in any one of SEQ ID NO: 1, 2, 3, 4, 5, 6 or 7 is defined by the linkage distance obtained by comparing the genetic profiles of both phages obtained by Multi-locus sequence typing (MLST) (see e.g. Maiden, M. C., 1998, Proc. Natl. Acad. Sci. USA 95:3140-3145). In some embodiments, the linkage distance obtained by MLST of the functional homolog and the phage having a genome as set forth in any one of SEQ ID NO: 1, 2, 3, 4, 5, 6 or 7 is of at least about 0.99, at least about 0.999 or more.

[0136] According to an additional or alternative embodiment, the functional homolog comprises a functionally conserved gene or a fragment thereof (i.e. an essential gene) e.g., an integrase gene, a polymerase gene, a capsid protein assembly gene, a DNA terminase, a tail fiber gene, or a repressor gene that is at least about 97%, at least about 98%, at least about 99%, at least about 99.1%, at least about 99.5%, at least about 99.6%, at least about 99.7%, at least about 99.8%, at least about 99.9%, or more identical to that of the bacteriophage having a genome as set forth in any one of SEQ ID NO: 1, 2, 3, 4, 5, 6 or 7.

[0137] For each of the disclosed bacteriophages, Example 7 provides the gene name of their essential genes.

[0138] According to an additional or alternative embodiment, the functional homolog is defined by a comparison of the coding sequence (gene) order.

[0139] According to an additional or alternative embodiment, the functional homolog is defined by a comparison of the coding sequence (gene) order of the essential genes of a bacteriophage selected from the bacteriophages listed in Table 2, as set forth in Example 7.

[0140] According to an additional or alternative embodiment, the functional homolog is defined by a comparison of order of non-coding sequences.

[0141] According to an additional or alternative embodiment, the functional homolog is defined by a comparison of order of coding and non-coding sequences.

[0142] According to some embodiments of the invention, the combined coding region of the functional homolog is such that it maintains the original order of the coding regions as within the genomic sequence of the bacteriophage having a genome as set forth in any one of SEQ ID NO: 1, 2, 3, 4, 5, 6 or 7, yet without the non-coding regions. In certain embodiments, the combined coding region does not include (excludes) transposon sequences, such as a sequence required for transposition, and/or transposon enzyme coding sequences (such as Transposase coding sequence).

[0143] For example, in case the genomic sequence has the following coding regions, A, B, C, D, E, F, G, each flanked by non-coding sequences (e.g., regulatory elements, and the like), the combined coding region will include a single nucleic acid sequence having the A+B+C+D+E+F+G coding regions combined together while maintaining the original order of their genome, yet without the non-coding sequences.

[0144] According to some embodiments of the invention, the combined non-coding region of the functional homolog is such that it maintains the original order of the non-coding regions as within the genomic sequence of the bacteriophage having a genome as set forth in any one of SEQ ID NO: 1, 2, 3, 4, 5, 6 or 7, yet without the coding regions as originally present in the original bacteriophage.

[0145] According to some embodiments of the invention, the combined non-coding region and coding region (i.e., the genome) of the functional homolog is such that it maintains the original order of the coding and non-coding regions as within the genomic sequence of the bacteriophage having a genome as set forth in any one of SEQ ID NO: 1, 2, 3, 4, 5, 6 or 7.

[0146] As used herein “maintains” relate to at least about 90%, 91%, 92%, 93%, 94%, 95%, 96%, 97%, 98%, 99% or 100% of the coding and/or non-coding regions of the functional homolog compared to the bacteriophage having a genome as set forth in any one of SEQ ID NO: 1, 2, 3, 4, 5, 6 or 7.

[0147] According to an additional or alternative embodiment, the functional homolog is defined by a comparison of gene content.

[0148] According to a specific embodiment, the functional homolog comprises a combined coding region at least about 90%, at least about 91%, at least about 92%, at least about 93%, at least about 94%, at least about 95%, at least about 96%, at least about 97%, at least about 98%, at least about 99%, or more (e.g., 100%) identical to the combined coding region existing in genome of the bacteriophage having a genome as set forth in any one of SEQ ID NO: 1, 2, 3, 4, 5, 6 or 7.

[0149] As used herein “combined coding region” refers to a nucleic acid sequence including all of the coding regions of the original bacteriophage yet without the non-coding regions of the original bacteriophage.

[0150] In one embodiment, the bacteriophages show up to 85%, 86%, 87%, 88%, 89%, 90%, 91%, 92%, 93%, 94%, 95%, 96%, 97%, 98%, 99% sequence identity with the bacteriophages disclosed herein and share at least one of the following characteristics-similar host range; similar type of infectivity (i.e. lytic or temperate).

[0151] In another embodiment, the bacteriophages show up to 85%, 86%, 87%, 88%, 89%, 90%, 91%, 92%, 93%, 94%, 95%, 96%, 97%, 98%, 99% sequence identity with the bacteriophages disclosed herein and share both of the following characteristics-similar host range; similar type of infectivity.

[0152] Additional bioinformatics methods that may be used to determine relatedness between two phage genomes include Nucmer and Minimap, both of which are alignment based tools; Win-zip, Jacard distance and MinHash, each of which are information based tools; and Codon usage similarity, pathway similarity and protein motif similarity.

[0153] As used herein, “host range” refers to the bacteria that are susceptible to infection by a particular phage. The host range of a phage may include, but is not limited to, a strain, a subspecies, a species, a genus, or multiple genera of bacteria.

[0154] Phage isolates may be prepared and phenotyped using methods known in the art, e.g., a plaque assay, liquid media assay, solid media assay. In some embodiments, the solid media assays to quantify and isolate phage are based on plaque assays (S. T. Abedon et al., Methods in Molecular Biology 2009 (Clifton, N.J.), 501, 161-74), ranging from efficiency of plating (EOP) (E. Kutter, Methods in Molecular Biology 2009 (Clifton, N.J.), 501, 141-9) to spot testing (P. Hyman et al., Advances in Applied Microbiology (1st ed., Vol. 70, pp. 217-48) 2010. Elsevier Inc.). In some embodiments, the plate format used for the plaque assay can be modified, e.g., from a petri dish to a 48-well plate.

[0155] In some embodiments, a double-layer plaque assay is used to phenotype bacteriophage isolates. For example, a starter culture of 4 mL BHIS may be inoculated with 50-100 colonies from a plate. This culture may be incubated at 37° C. for 16 hours in an anaerobic environment. A volume of 200 μL of this culture may be mixed with 100 μL of a phage-containing sample (or medium only control) and incubated for 15 minutes. 5 mL of BHIS top agar (pre-molten 0.4% agar BHIS supplemented with 1 mM Ca²⁺, Mn²⁺ and Mg²⁺ ions may be added), and the mixture may be poured over a BHIS bottom agar plate (1.5% agar BHIS). The plates may be allowed to gel at room temperature, and then incubated for 16 hours at 37 or 32° C. (for simulating skin temperature) in anaerobic environment until plaques are identified.

[0156] In some embodiments, a modified spot drop assay is used to phenotype bacteriophage isolates. For example, a starter culture of 4 mL BHIS may be inoculated with 50-100 colonies from a plate. This culture may be incubated at 37° C. for 16 hours in an anaerobic environment. A volume of 200 μL of this culture may be mixed with 5 mL of BHIS top agar (pre-molten 0.4% agar BHIS supplemented with 1 mM Ca²⁺, Mn²⁺ and Mg²⁺ ions may be added), and the mixture may be poured over a BHIS bottom agar plate (1.5% agar BHIS). The plates may be allowed to gel at room temperature, and then incubated for 30 min at 37 C in anaerobic environment. At this stage, 5 μL of samples containing phage or media only as control may be dropped on the plate, left to absorb, and then may be incubated for 16 hours until plaques are visible for counting.

[0157] In some embodiments, inverted Plaque Assay is used as an alternative to the Double Layer Plaque Assay. In this method, phages are incorporated into the top agar, the top agar is poured on half of the media plate and bacteria are streaked on it. Contrary to the double layer plaque assay, no plaque is formed, but rather, sensitive bacteria appeared either as infected lawn (perforated lawn), or single colonies, or no colony at all only at the part of the plate which consist of top agar and phages. The growth of bacteria on the top agar with the tested phage is compared to the growth of the same bacteria on the other side of the plate, without phage (No Phage Control (NPC)).

[0158] Each phage is diluted to 10⁹ PFU/mL in BHIS, and 10 μL is transferred into 10 mL melted top agar with 1 mM ions (at 56° C.). Following a gentle mix, the tube contents is poured onto a BHIS plate. The plates are left for 20 min to allow the top agar to solidify. Frozen bacteria is inoculate on agar plate, and incubated overnight (15-16 h) at 37° C. The following day, 5-10 colonies are merged and streaked on the inverted plate, starting with the NPC side and ending in the top agar with phage side. The plates are incubated at 37° C. overnight (15-16 hours). The growth of the bacteria on the top agar and phage side is compared to the growth on the bacteria on the NPC side. Bacteria are designated sensitive (“S”) or resistant (“R”) to the phage.

[0159] In some embodiments, a liquid media assay is used to phenotype the bacteriophage. In some embodiments, liquid-based phage infection assays follow the time-course of infection and can provide more than quantitative end-points of infection as compared to the solid-phase plaque assays. In some embodiments, by mixing phage with bacteria in liquid medium, then following the turbidity of the culture over time, one can discern finer differences (e.g., a delay in the time of cell lysis) between how different bacterial strains interact with the phage.

[0160] In some embodiments, a liquid-based phage infection assays is used to measure the time duration from the beginning of the experiment, when the bacteria and phages are mixed together until the host bacteria develops resistance to the phages (presumably by mutation). This period is also known as time-to-mutant (TTM). Such TTM assay was used to produce the results presented in FIGS. 5A-5B.

[0161] In some embodiments, the TTM is declared synergistic when the OD reading reaches a predetermined threshold (e.g. 0.3 OD600). Then synergistic redundancy effect is concluded if the TTM of a combination (e.g. X, Y) is for example 50% longer than the longer TTM of the individual member phages (e.g., the TTM of X by itself and the TTM of Y by itself).

[0162] In one embodiment, the synergistic effect is defined as above 10%, 20%, 30%, 40%, 50%, 60%, 70%, 80% above the longer individual phage member TTM.

[0163] In some embodiments, the liquid media assay allows for high-throughput measurements by using 96-well plates and reading optical density in a plate reader. For example, a bacterial strain may be grown for 16 hours until an OD₆₀₀ of about 1.5-2. This culture may then be diluted using BHIS medium to a starting optical density, typically between 0.03 and 0.05 OD₆₀₀. A volume of 200 μL of culture may then be dispensed into the wells of a Nunclon flat-bottomed 96-well plate. 10 μL of a sample containing phage or 10 μL of medium as control may be added to each well. The wells may be covered with 50 μL of mineral oil to limit evaporation, and a thin sterile optically transparent polyurethane film may be added to keep the culture sterile. Optical density measurements may be carried out every 20 minutes, e.g., in a Tecan Infinite M200 plate reader connected to a Tecan EVO75 robot. Between measurements, the plate may be incubated while shaking at 37 or 32° C., e.g., inside the EVO75 incubator.

[0164] In some embodiments, infectivity is determined by the plaque presence in a solid assay only. In some embodiments, infectivity is determined by the plaque presence in a liquid assay only. In some embodiments, infectivity is determined by the plaque presence in both the liquid assay and the solid assay.

[0165] The bacteriophages described herein are typically present in a preparation in which their prevalence (i.e., concentration) is enriched over that (exceeds that) found in nature.

[0166] The term “preparation” refers to a composition in which the prevalence of bacteriophage is enriched over that found in nature. Since bacteriophages infect bacterial cells, they may be found in specimens or samples which are rich in bacteria—e.g. environmental samples such as sewage, wastewater and biological samples including feces. According to some embodiments of the invention, the preparation comprises less than 50 microbial species, e.g., bacteria and fungi—e.g., less than 40 bacterial species, less than 30 bacterial species, less than 20 bacterial species, less than 10 bacterial species, less than 5 bacterial species, less than 4 bacterial species, less than 3 bacterial species, less than 2 bacterial species or even devoid completely of bacteria.

[0167] According to a particular embodiment, the preparation comprises a single strain of bacteriophage (or a functional homolog thereof), no more than two different bacteriophage strains (or functional homologs thereof), no more than three different bacteriophage strains (or functional homologs thereof), no more than four different bacteriophage strains (or functional homologs thereof), no more than five different bacteriophage strains (or functional homologs thereof), no more than six different bacteriophage strains (or functional homologs thereof), no more than seven different bacteriophage strains (or functional homologs thereof), no more than eight different bacteriophage strains (or functional homologs thereof), no more than nine different bacteriophage strains (or functional homologs thereof), or no more than ten different bacteriophage strains (or functional homologs thereof).

[0168] In one embodiment, the preparation comprises a plurality of phage strains when at least one of the phage strains is STA48-1 (having the genome sequence at least 90% (e.g., at least 91%, 92%, 93%, 94%, 95%, 96%, 97%, 98%, 99%, 99.2%, 99.4%, 99.6%, 99.8%, 99.9% or 100%) identical to the sequence as set forth in SEQ ID NO: 1).

[0169] In another embodiment, the preparation comprises a plurality of phage strains when at least one of the phage strains is STA48-7 (having the genome sequence at least 90% (e.g., at least 91%, 92%, 93%, 94%, 95%, 96%, 97%, 98%, 99%, 99.2%, 99.4%, 99.6%, 99.8%, 99.9% or 100%) identical to the sequence as set forth in SEQ ID NO: 7).

[0170] In another embodiment, the preparation comprises a plurality of phage strains when at least one of the phage strains is STA48-5 (having the genome sequence at least 90% (e.g., at least 91%, 92%, 93%, 94%, 95%, 96%, 97%, 98%, 99%, 99.2%, 99.4%, 99.6%, 99.8%, 99.9% or 100%) identical to the sequence as set forth in SEQ ID NO: 5).

[0171] In one embodiment, the preparation comprises at least two different phage strains when at least one of the phage strains is STA48-1 (having the genome sequence at least 90% (e.g., at least 91%, 92%, 93%, 94%, 95%, 96%, 97%, 98%, 99%, 99.2%, 99.4%, 99.6%, 99.8%, 99.9% or 100%) identical to the sequence as set forth in SEQ ID NO: 1) and the other of the phage strains is STA48-7 (having the genome sequence at least 90% (e.g., at least 91%, 92%, 93%, 94%, 95%, 96%, 97%, 98%, 99%, 99.2%, 99.4%, 99.6%, 99.8%, 99.9% or 100%) identical to the sequence as set forth in SEQ ID NO: 7).

[0172] In one embodiment, the preparation comprises at least three different phage strains when at least one of the phage strains is STA48-1 (having the genome sequence at least 90% (e.g., at least 91%, 92%, 93%, 94%, 95%, 96%, 97%, 98%, 99%, 99.2%, 99.4%, 99.6%, 99.8%, 99.9% or 100%) identical to the sequence as set forth in SEQ ID NO: 1), the second of the phage strains is STA48-7 (having the genome sequence at least 90% (e.g., at least 91%, 92%, 93%, 94%, 95%, 96%, 97%, 98%, 99%, 99.2%, 99.4%, 99.6%, 99.8%, 99.9% or 100%) identical to the sequence as set forth in SEQ ID NO: 7) and the third of the phage strains is STA48-5 (having the genome sequence at least 90% (e.g., at least 91%, 92%, 93%, 94%, 95%, 96%, 97%, 98%, 99%, 99.2%, 99.4%, 99.6%, 99.8%, 99.9% or 100%) identical to the sequence as set forth in SEQ ID NO: 5).

[0173] Exemplary combinations of core phages in a single composition are provided in Table 1 herein below.

[0174] Additional contemplated combinations are provided in Example 2, Example 3 and Example 4 herein below.

TABLE 1

| | | | | | Cocktail |
|---|---|---|---|---|---|
| combination | Phage 1 | Phage 2 | Phage 3 | Phage 4 | name |
| 1 | STA48-1 | STA48-7 | NA | NA | ADX1 |
| 2 | STA48-1 | STA48-7 | STA48-5 | NA | ADX2 |
| 3 | STA48-1 | STA48-7 | STA48-4 | NA | ADX3 |
| 4 | STA48-1 | STA48-7 | STA48-5 | STA48-4 | ADX4 |
| 5 | STA48-6 | STA48-7 | NA | NA | ADX5 |
| 6 | STA48-6 | STA48-7 | STA48-5 | NA | ADX6 |
| 7 | STA48-6 | STA48-7 | STA48-4 | NA | ADX7 |
| 8 | STA48-6 | STA48-7 | STA48-5 | STA48-4 | ADX8 |
| 9 | STA48-1 | STA48-7 | NA | NA | ADX9 |
| 10 | STA48-1 | STA48-7 | STA48-6 | NA | ADX10 |
| 11 | STA48-1 | STA48-7 | STA48-4 | NA | ADX11 |
| 12 | STA48-1 | STA48-7 | STA48-6 | STA48-4 | ADX12 |

[0175] One exemplary cocktail contemplated by the present inventors is one which comprises the following phages: STA48-1, STA48-7, STA48-5 (ADX2).

[0176] In one embodiment, the combination is selected such that more than 20% of the different strains of bacteria of a mixed population of Staphylococcus aureus (e.g., comprising more than 70 different Staphylococcus aureus strains, more than 90 different Staphylococcus aureus strains and preferably more than 110 different Staphylococcus aureus strains) are targeted (and lysed). In one embodiment, the combination is selected such that more than 20% of all the strains of Staphylococcus aureus which infect humans are targeted and lysed. In a specific embodiment, the mixed population is selected from the list Staphylococcus aureus strains in Example 1 and/or Table 6.

[0177] In another embodiment, the combination is selected such that at least 40, 60, 80, 100, 200, 300, 400, 500, 600, 700, 800, 900 or 1000 different Staphylococcus aureus strains are targeted.

[0178] In one embodiment, the combination is selected such that more than 30% of the different strains of bacteria of a mixed population of Staphylococcus aureus (e.g. comprising more than 80 different Staphylococcus aureus strains, more than 100 different Staphylococcus aureus strains and preferably more than 120 different Pseudomonas aureus strains) are targeted (and lysed). In one embodiment, the combination is selected such that more than 30% of all the strains of Staphylococcus aureus which infect humans are targeted and lysed.

[0179] In one embodiment, the combination is selected such that more than 40% of the different strains of bacteria of a mixed population of Staphylococcus aureus (e.g. comprising more than 80 different Staphylococcus aureus strains, more than 100 different Staphylococcus aureus strains and preferably more than 120 different Pseudomonas aureus strains) are targeted (and lysed). In one embodiment, the combination is selected such that more than 40% of all the strains of Staphylococcus aureus which infect humans are targeted and lysed.

[0180] In one embodiment, the combination is selected such that more than 45% of the different strains of bacteria of a mixed population of Staphylococcus aureus (e.g. comprising more than 80 different Staphylococcus aureus strains, more than 100 different Staphylococcus aureus strains and preferably more than 120 different Pseudomonas aureus strains) are targeted (and lysed). In one embodiment, the combination is selected such that more than 45% of all the strains of Staphylococcus aureus which infect humans are targeted and lysed.

[0181] In one embodiment, the combination is selected such that more than 50% of the different strains of bacteria of a mixed population of Staphylococcus aureus (e.g. comprising more than 80 different Staphylococcus aureus strains, more than 100 different Staphylococcus aureus strains and preferably more than 120 different Pseudomonas aureus strains) are targeted (and lysed). In one embodiment, the combination is selected such that more than 50% of all the strains of Staphylococcus aureus which infect humans are targeted and lysed.

[0182] In one embodiment, the combination is selected such that more than 55% of the different strains of bacteria of a mixed population of Staphylococcus aureus (e.g. comprising more than 80 different Staphylococcus aureus strains, more than 100 different Staphylococcus aureus strains and preferably more than 120 different Pseudomonas aureus strains) are targeted (and lysed). In one embodiment, the combination is selected such that more than 55% of all the strains of Staphylococcus aureus which infect humans are targeted and lysed.

[0183] In one embodiment, the combination is selected such that more than 60% of the different strains of bacteria of a mixed population of Staphylococcus aureus (e.g. comprising more than 80 different Staphylococcus aureus strains, more than 100 different Staphylococcus aureus strains and preferably more than 120 different Pseudomonas aureus strains) are targeted (and lysed). In one embodiment, the combination is selected such that more than 60% of all the strains of Staphylococcus aureus which infect humans are targeted and lysed.

[0184] In one embodiment, the combination is selected such that more than 65% of the different strains of bacteria of a mixed population of Staphylococcus aureus (e.g. comprising more than 80 different Staphylococcus aureus strains, more than 100 different Staphylococcus aureus strains and preferably more than 120 different Pseudomonas aureus strains) are targeted (and lysed). In one embodiment, the combination is selected such that more than 65% of all the strains of Staphylococcus aureus which infect humans are targeted and lysed.

[0185] In one embodiment, the combination is selected such that more than 70% of the different strains of bacteria of a mixed population of Staphylococcus aureus (e.g. comprising more than 80 different Staphylococcus aureus strains, more than 100 different Staphylococcus aureus strains and preferably more than 120 different Pseudomonas aureus strains) are targeted (and lysed). In one embodiment, the combination is selected such that more than 70% of all the strains of Staphylococcus aureus which infect humans are targeted and lysed.

[0186] In one embodiment, the combination is selected such that more than 75% of the different strains of bacteria of a mixed population of Staphylococcus aureus (e.g. comprising more than 80 different Staphylococcus aureus strains, more than 100 different Staphylococcus aureus strains and preferably more than 120 different Pseudomonas aureus strains) are targeted (and lysed). In one embodiment, the combination is selected such that more than 75% of all the strains of Staphylococcus aureus which infect humans are targeted and lysed.

[0187] In one embodiment, the combination is selected such that more than 80% of the different strains of bacteria of a mixed population of Staphylococcus aureus (e.g. comprising more than 80 different Staphylococcus aureus strains, more than 100 different Staphylococcus aureus strains and preferably more than 120 different Pseudomonas aureus strains) are targeted (and lysed). In one embodiment, the combination is selected such that more than 80% of all the strains of Staphylococcus aureus which infect humans are targeted and lysed.

[0188] In one embodiment, the combination is selected such that more than 85% of the different strains of bacteria of a mixed population of Staphylococcus aureus (e.g. comprising more than 80 different Staphylococcus aureus strains, more than 100 different Staphylococcus aureus strains and preferably more than 120 different Pseudomonas aureus strains) are targeted (and lysed). In one embodiment, the combination is selected such that more than 85% of all the strains of Staphylococcus aureus which infect humans are targeted and lysed.

[0189] In one embodiment, the combination is selected such that more than 90% of the different strains of bacteria of a mixed population of Staphylococcus aureus (e.g. comprising more than 80 different Staphylococcus aureus strains, more than 100 different Staphylococcus aureus strains and preferably more than 120 different Pseudomonas aureus strains) are targeted (and lysed). In one embodiment, the combination is selected such that more than 90% of all the strains of Staphylococcus aureus which infect humans are targeted and lysed.

[0190] The combinations described herein can be selected to include phages which have overlapping host coverages. The host coverages can be defined in terms of bacterial strain classification, bacterial capsule type, bacterial clonal complex and/or Multi-locus sequence typing (MLST)—see (sanger-pathogens(dot)github(dot)io/ariba/).

[0191] In one embodiment, the combination is selected such that more than 10% of the different strains of bacteria of a mixed population of Staphylococcus aureus (e.g. comprising more than 80 different Staphylococcus aureus strains, more than 100 different Staphylococcus aureus strains and preferably more than 120 different Pseudomonas aureus strains) are targeted by more than one phage strain (e.g. at least 2 phage strains of the combination, at least 3 phage strains of the combination, at least 4 phage strains of the combination or at least 5 phage strains of the combination). In one embodiment, the combination is selected such that more than 10% of all the strains of Staphylococcus aureus which infect humans are targeted and lysed by more than one phage strain (e.g. at least 2 phage strains of the combination, at least 3 phage strains of the combination, at least 4 phage strains of the combination or at least 5 phage strains of the combination).

[0192] In another embodiment, the combination is selected such that at least 10, 20, 40, 60, 80, 100 specific Staphylococcus aureus strains are targeted by more than 1 (e.g. 2, 3, 4 or 5) phage strain of the combination.

[0193] In another embodiment, the combination is selected such that more than 15% of the different strains of bacteria of a mixed population of Staphylococcus aureus (e.g. comprising more than 80 different Staphylococcus aureus strains, more than 100 different Staphylococcus aureus strains and preferably more than 120 different Pseudomonas aureus strains) are targeted by more than one phage strain (e.g. at least 2 phage strains of the combination, at least 3 phage strains of the combination, at least 4 phage strains of the combination or at least 5 phage strains of the combination). In one embodiment, the combination is selected such that more than 15% of all the strains of Staphylococcus aureus which infect humans are targeted and lysed by more than one phage strain (e.g. at least 2 phage strains of the combination, at least 3 phage strains of the combination, at least 4 phage strains of the combination or at least 5 phage strains of the combination).

[0194] In another embodiment, the combination is selected such that more than 20% of the different strains of bacteria of a mixed population of Staphylococcus aureus (e.g. comprising more than 80 different Staphylococcus aureus strains, more than 100 different Staphylococcus aureus strains and preferably more than 120 different Pseudomonas aureus strains) are targeted by more than one phage strain (e.g. at least 2 phage strains of the combination, at least 3 phage strains of the combination, at least 4 phage strains of the combination or at least 5 phage strains of the combination). In one embodiment, the combination is selected such that more than 20% of all the strains of Staphylococcus aureus which infect humans are targeted and lysed by more than one phage strain (e.g. at least 2 phage strains of the combination, at least 3 phage strains of the combination, at least 4 phage strains of the combination or at least 5 phage strains of the combination).

[0195] In another embodiment, the combination is selected such that more than 25% of the different strains of bacteria of a mixed population of Staphylococcus aureus (e.g. comprising more than 80 different Staphylococcus aureus strains, more than 100 different Staphylococcus aureus strains and preferably more than 120 different Pseudomonas aureus strains) are targeted by more than one phage strain (e.g. at least 2 phage strains of the combination, at least 3 phage strains of the combination, at least 4 phage strains of the combination or at least 5 phage strains of the combination). In one embodiment, the combination is selected such that more than 25% of all the strains of Staphylococcus aureus which infect humans are targeted and lysed by more than one phage strain (e.g. at least 2 phage strains of the combination, at least 3 phage strains of the combination, at least 4 phage strains of the combination or at least 5 phage strains of the combination).

[0196] In another embodiment, the combination is selected such that more than 30% of the different strains of bacteria of a mixed population of Staphylococcus aureus (e.g. comprising more than 80 different Staphylococcus aureus strains, more than 100 different Staphylococcus aureus strains and preferably more than 120 different Pseudomonas aureus strains) are targeted by more than one phage strain (e.g. at least 2 phage strains of the combination, at least 3 phage strains of the combination, at least 4 phage strains of the combination or at least 5 phage strains of the combination). In one embodiment, the combination is selected such that more than 30% of all the strains of Staphylococcus aureus which infect humans are targeted and lysed by more than one phage strain (e.g. at least 2 phage strains of the combination, at least 3 phage strains of the combination, at least 4 phage strains of the combination or at least 5 phage strains of the combination).

[0197] In another embodiment, the combination is selected such that more than 35% of the different strains of bacteria of a mixed population of Staphylococcus aureus (e.g. comprising more than 80 different Staphylococcus aureus strains, more than 100 different Staphylococcus aureus strains and preferably more than 120 different Pseudomonas aureus strains) are targeted by more than one phage strain (e.g. at least 2 phage strains of the combination, at least 3 phage strains of the combination, at least 4 phage strains of the combination or at least 5 phage strains of the combination). In one embodiment, the combination is selected such that more than 35% of all the strains of Staphylococcus aureus which infect humans are targeted and lysed by more than one phage strain (e.g. at least 2 phage strains of the combination, at least 3 phage strains of the combination, at least 4 phage strains of the combination or at least 5 phage strains of the combination).

[0198] In another embodiment, the combination is selected such that more than 40% of the different strains of bacteria of a mixed population of Staphylococcus aureus (e.g. comprising more than 80 different Staphylococcus aureus strains, more than 100 different Staphylococcus aureus strains and preferably more than 120 different Pseudomonas aureus strains) are targeted by more than one phage strain (e.g. at least 2 phage strains of the combination, at least 3 phage strains of the combination, at least 4 phage strains of the combination or at least 5 phage strains of the combination). In one embodiment, the combination is selected such that more than 40% of all the strains of Staphylococcus aureus which infect humans are targeted and lysed by more than one phage strain (e.g. at least 2 phage strains of the combination, at least 3 phage strains of the combination, at least 4 phage strains of the combination or at least 5 phage strains of the combination).

[0199] In another embodiment, the combination is selected such that more than 45% of the different strains of bacteria of a mixed population of Staphylococcus aureus (e.g. comprising more than 80 different Staphylococcus aureus strains, more than 100 different Staphylococcus aureus strains and preferably more than 120 different Pseudomonas aureus strains) are targeted by more than one phage strain (e.g. at least 2 phage strains of the combination, at least 3 phage strains of the combination, at least 4 phage strains of the combination or at least 5 phage strains of the combination). In one embodiment, the combination is selected such that more than 45% of all the strains of Staphylococcus aureus which infect humans are targeted and lysed by more than one phage strain (e.g. at least 2 phage strains of the combination, at least 3 phage strains of the combination, at least 4 phage strains of the combination or at least 5 phage strains of the combination).

[0200] In another embodiment, the combination is selected such that more than 50% of the different strains of bacteria of a mixed population of Staphylococcus aureus (e.g. comprising more than 80 different Staphylococcus aureus strains, more than 100 different Staphylococcus aureus strains and preferably more than 120 different Pseudomonas aureus strains) are targeted by more than one phage strain (e.g. at least 2 phage strains of the combination, at least 3 phage strains of the combination, at least 4 phage strains of the combination or at least 5 phage strains of the combination). In one embodiment, the combination is selected such that more than 50% of all the strains of Staphylococcus aureus which infect humans are targeted and lysed by more than one phage strain (e.g. at least 2 phage strains of the combination, at least 3 phage strains of the combination, at least 4 phage strains of the combination or at least 5 phage strains of the combination).

[0201] It will be appreciated that, throughout the specification, when a phage is specifically named, the present invention also considers those phage that have at least 90% identity to the sequence of their genome, wherein the phage has a similar host range.

[0202] According to a specific embodiment, the preparation comprises at least about 10⁶ PFU, 10⁷ PFU, 10⁸ PFU, 10⁹ PFU, or even 10¹⁰ PFU or more of the above described (e.g. deposited) bacteriophages or functional homolog of same or progeny of same.

[0203] The bacteriophages described herein may be genetically modified such that their genomes include a heterologous sequence.

[0204] In one embodiment, the heterologous sequence serves as a marker signifying whether transformation is successful—e.g., a barcode sequence.

[0205] In another embodiment, the heterologous sequence encodes a therapeutic or diagnostic agent (also referred to herein as a payload). The therapeutic or diagnostic agent may be a nucleic acid (e.g. RNA silencing agent), a peptide or a protein. The therapeutic agent is typically selected according to the disease which is to be treated. Thus, for example if the bacteriophage is to be used for treating diseases associated with Staphylococcus aureus infection, the therapeutic agent is typically one that is known to be useful for treating that disease.

[0206] As used herein, the term “RNA silencing agent” refers to an RNA which is capable of specifically inhibiting or “silencing” the expression of a target gene. In certain embodiments, the RNA silencing agent is capable of preventing complete processing (e.g., the full translation and/or expression) of an mRNA molecule through a post-transcriptional silencing mechanism. RNA silencing agents include noncoding RNA molecules, for example RNA duplexes comprising paired strands, as well as precursor RNAs from which such small non-coding RNAs can be generated. Exemplary RNA silencing agents include dsRNAs such as siRNAs, miRNAs and shRNAs. In one embodiment, the RNA silencing agent is capable of inducing RNA interference. In another embodiment, the RNA silencing agent is capable of mediating translational repression. According to an embodiment of the invention, the RNA silencing agent is specific to the target RNA and does not cross inhibit or silence a gene or a splice variant which exhibits 99% or less global homology to the target gene, e.g., less than 98%, 97%, 96%, 95%, 94%, 93%, 92%, 91%, 90%, 89%, 88%, 87%, 86%, 85%, 84%, 83%, 82%, 81% global homology to the target gene.

[0207] Exemplary RNA silencing agents include but are not limited to siRNA, shRNA, miRNA and guide RNA (gRNA).

[0208] The therapeutic agent may be a bacterial protein or peptide (e.g., a small bacterial peptide that could act as a vaccine in the subject treated with the bacteriophage), a therapeutic protein or peptide (e.g., a cytokine, e.g., IL-15), a soluble peptide or protein ligand (e.g., a STING agonist or TRAIL), an antibody or an antibody fragment that recognizes a virulent or disease-causing antigen or is useful in an immunotherapy (e.g., a checkpoint inhibitor), an enzyme that when expressed produces a therapeutic useful product (e.g., a bacterial enzyme or metabolic cassette that produces a therapeutically useful bacterial metabolite or other bacterial antigen; a bacterial enzyme that produces LPS or causes cleavage of LPS from the outer membrane of gram negative bacteria), a shared tumor antigen or an enzyme that when expressed produces a shared tumor antigen, a unique tumor antigen or neoantigen or an enzyme that when expressed produces a unique tumor antigen or neoantigen.

[0209] In another embodiment, the therapeutic agent is an agent that is therapeutic in the treatment of atopic dermatitis.

[0210] According to another embodiment, the therapeutic agent is an immune modulating agent.

[0211] Examples of immune modulating agents include immunomodulatory cytokines, including but not limited to, IL-2, IL-15, IL-7, IL-21, GM-CSF as well as any other cytokines that are capable of further enhancing immune responses; immunomodulatory antibodies, including but not limited to, anti-CTLA4, anti-CD40, anti-41BB, anti-OX40, anti-PD1 and anti-PDL1.

[0212] Examples of diagnostic agents include fluorescent proteins or enzymes producing a colorimetric reaction. Exemplary proteins that generate a detectable signal include, but are not limited to green fluorescent protein (Genbank Accession No. AAL33912), alkaline phosphatase (Genbank Accession No. AAK73766), peroxidase (Genbank Accession No. NP_568674), histidine tag (Genbank Accession No. AAK09208), Myc tag (Genbank Accession No. AF329457), biotin ligase tag (Genbank Accession No. NP_561589), orange fluorescent protein (Genbank Accession No. AAL33917), beta galactosidase (Genbank Accession No. NM_125776), Fluorescein isothiocyanate (Genbank Accession No. AAF22695) and strepavidin (Genbank Accession No. S11540).

[0213] In another example, the diagnostic agent is a luminescent protein such as products of bacterial luciferase genes, e.g., the luciferase genes encoded by Vibrio harveyi, Vibrio fischeri, and Xenorhabdus luminescens, the firefly luciferase gene FFlux, and the like.

[0214] Recombinant methods for inserting heterologous sequences into a phage genome are well-known in the art. The appropriate coding sequence is inserted in one or more of several locations in the phage genome. In one embodiment, the nucleic acid insert that is introduced into the phage genome is approximately no more than 10% of the phage genome length.

[0215] The payload coding sequence is inserted either after early, middle or late expressing phage genes and it can be expressed as part of a phage operon, relying on either an existing phage operon, promoter and terminator, or as a distinct operon. In the latter case, a relevant promoter and terminator from the phage is inserted as part of the newly formed operon.

[0216] For example, if strong expression of a payload is required, the payload coding sequence is added after the stop codon of the major capsid protein and expressed as part of the major capsid operon. Alternatively, it can be expressed by addition of a major capsid protein promoter and terminator as an individual newly formed operon which can be inserted anywhere in the phage genome that would not damage the functionality of the phage. If low expression of a payload is desired, the payload coding sequence can be added after the terminase gene (or other low expressing gene), which usually has low expression. Moreover, payload levels are tuned by adding a ribosome binding site with a desired strength.

[0217] In order to avoid negatively affecting phage infectivity and specificity, the payload coding sequence is typically not inserted inside an existing phage open reading frame. An exception to this is the case when the payload is intended to be expressed as a fusion protein of the phage outer coat. In that latter case of payload display, the payload coding sequence is added in frame to sequence encoding the phage coat protein.

[0218] The bacteriophages described herein may be used to treat subjects having diseases associated with Staphylococcus aureus infection.

[0219] Diseases associated with Staphylococcus aureus infection include atopic dermatitis and infectious wounds.

[0220] As used herein, the term “subject” includes mammals, preferably human beings at any age which suffer from the pathology. Those in need of treatment may include individuals already having AD, as well as those at risk of having, or who may ultimately acquire the disease. The need for treatment is assessed, e.g., by the presence of one or more risk factors associated with the development of AD, the presence or progression of AD, or likely receptiveness to treatment of a subject having AD. For example, “treating” AD may encompass reducing or eliminating associated symptoms, and does not necessarily encompass the elimination of the underlying disease etiology, e.g., a genetic instability locus.

[0221] The term “treating” refers to inhibiting, preventing, or arresting the development of a pathology (disease, disorder or condition) and/or causing the reduction, remission, or regression of a pathology. Those of skill in the art will understand that various methodologies and assays can be used to assess the development of a pathology, and similarly, various methodologies and assays may be used to assess the reduction, remission, or regression of a pathology.

[0222] The bacteriophage may be used per se or as part of a pharmaceutical composition, where it is mixed with suitable carriers or excipients.

[0223] As used herein a “pharmaceutical composition” refers to a preparation of one or more of the active ingredients described herein with other chemical components such as physiologically suitable carriers and excipients. The purpose of a pharmaceutical composition is to facilitate administration of a compound to an organism.

[0224] Herein the term “active ingredient” refers to the bacteriophage accountable for the biological effect.

[0225] Hereinafter, the phrases “physiologically acceptable carrier” and “pharmaceutically acceptable carrier” which may be interchangeably used refer to a carrier or a diluent that does not cause significant irritation to an organism and does not abrogate the biological activity and properties of the administered compound.

[0226] Herein the term “excipient” refers to an inert substance added to a pharmaceutical composition to further facilitate administration of an active ingredient. Examples, without limitation, of excipients include calcium carbonate, calcium phosphate, various sugars and types of starch, cellulose derivatives, gelatin, vegetable oils and polyethylene glycols.

[0227] Techniques for formulation and administration of drugs may be found in “Remington's Pharmaceutical Sciences,” Mack Publishing Co., Easton, PA, latest edition, which is incorporated herein by reference.

[0228] Suitable routes of administration may, for example, include topical, inhalation (e.g., by inhaler or nebulizer), oral, rectal, transmucosal, especially transnasal, intestinal or parenteral delivery, including intramuscular, subcutaneous and intramedullary injections as well as intrathecal, direct intraventricular, intracardiac, e.g., into the right or left ventricular cavity, into the common coronary artery, intravenous, intraperitoneal, intranasal, or intraocular injections.

[0229] Alternately, one may administer the pharmaceutical composition in a local rather than systemic manner, for example, via topical application to the skin. In one embodiment, the bacteriophage may be administered directly into a tumor of the subject.

[0230] Pharmaceutical compositions of some embodiments of the invention may be manufactured by processes well known in the art, e.g., by means of conventional mixing, dissolving, granulating, dragee-making, levigating, emulsifying, encapsulating, entrapping, spray drying, coating or lyophilizing processes.

[0231] Pharmaceutical compositions for use in accordance with some embodiments of the invention thus may be formulated in conventional manner using one or more physiologically acceptable carriers comprising excipients and auxiliaries, which facilitate processing of the active ingredients into preparations which, can be used pharmaceutically. Proper formulation is dependent upon the route of administration chosen.

[0232] In some embodiments, the composition is formulated for delivery to mammalian skin, mammalian eyes, mammalian teeth or an implant to be inserted into a mammal. Preferably, the mammal is a human.

[0233] In some embodiments, the composition is formulated for topical application. In some embodiments, the composition is in the form of a gel, cream, ointment, lotion, paste, solution, microemulsion, liquid wash, spray, application stick, cosmetic, dressing, face-wash, soap, powder, spray, capsule, eye drop, eye ointment, eye lotion, solid, or a moist sponge wipe, or is bonded to a solid surface. In some embodiments, the composition comprises an adjuvant, a carrier or a vehicle. In some embodiments, the composition comprises one or more additives selected from solubilizers, emollients, humectants, thickening agents, permeation enhancers, chelating agents, antioxidants, buffering agents, isotonic agents, suspending agents, emulsifying agents, stabilizers and preservatives. In some embodiments, the composition comprises one or more of a gel-forming agent, a cream-forming agent, a wax, an oil, a surfactant, and a binder.

[0234] “Administering” or “administration of” a substance, a compound, a composition, a formulation or an agent to a subject can be carried out using one of a variety of methods known to those skilled in the art. For example, a compound or an agent can be administered topically, by applying on the skin, teeth, eyes or on parts of eyes including but not limited to the lens capsule and the corneal stroma. For example, the composition may be in a form suitable for topical administration and be in the form of a cream, paste, solution, powder, spray, aerosol, capsule, eye drop, eye ointment, eye lotion, solid or gel, or may be bonded to a solid surface. The composition may also form part of a face wash, soap, application stick, cosmetic or dressing. Administering can also be performed, for example, once, a plurality of times, and/or over one or more extended periods. In some aspects, the administration includes both direct administration, including self-administration, and indirect administration, including the act of prescribing a formulation. For example, as used herein, a physician who instructs a patient to self-administer a formulation, or to have the formulation administered by another and/or who provides a patient with a prescription for a formulation is administering the formulation to the patient.

[0235] The pharmaceutical compositions described herein may be formulated in a conventional manner using one or more physiologically acceptable carriers comprising excipients and auxiliaries, which facilitate processing of the active ingredients into compositions for pharmaceutical use. Methods of formulating pharmaceutical compositions are known in the art (see, e.g., “Remington's Pharmaceutical Sciences,” Mack Publishing Co., Easton, PA). In some embodiments, the pharmaceutical compositions are subjected to appropriate formulation for topical administration, including but not limited to methods of manufacturing a gel, cream, paste, ointment, solution, microemulsion, lotion, liquid wash, spray, application stick, cosmetic, dressing, face-wash, soap, powder, spray, capsule, eye drop, eye ointment, eye lotion, solid, a moist sponge wipe or a composition bonded to a solid surface.

[0236] The bacteriophage described herein may be formulated into pharmaceutical compositions in any suitable topical dosage form (e.g., a gel, cream, paste, ointment, solution, microemulsion, lotion, liquid wash, spray, application stick, cosmetic, dressing, face-wash, soap, powder, spray, capsule, eye drop, eye ointment, eye lotion, solid, a moist sponge wipe or may be bonded to a solid surface) and for any suitable type of administration (e.g., immediate-release, pulsatile-release, delayed-release, extended-release or sustained release). In some embodiments, the bacteriophages are formulated for administration as a gel, cream, paste, ointment, solution, microemulsion, lotion, liquid wash, spray, application stick, cosmetic, dressing, face-wash, soap, powder, spray, capsule, eye drop, eye ointment, eye lotion, solid, a moist sponge wipe or may be bonded to a solid surface. The composition may be administered once or more daily, weekly, or monthly.

[0237] In some embodiments, the bacteriophage may be covalently attached to a carrier particle, for use as a topical formulation or for application to an implant. In some embodiments, the carrier particle is typically approximately spherical, may have an average diameter of up to 20 microns, up to 15 microns, up to 10 microns, from 0.1 microns, from 0.5 microns or any combinations of these—e.g. from 0.1 microns to 20 microns or from 0.5 microns to 10 microns. The particles in general can be approximately round or spheroid; they are preferably smooth, especially for use on sensitive parts of the body. Particle size is suitably measured using methods and apparatus recognized as standard in the art. Particle sizing in dispersions can be accomplished using a variety of techniques, including laser diffraction, dynamic light scattering (DLS), disc centrifugation, and light microscopy. Examples of sizing equipment are made by Malvern Instruments (UK), using laser diffraction methods. In some embodiments, bacteriophages may be covalently attached to a plurality of particles. These are preferably in relatively homogenous form, in which a large proportion of the plurality of particles have diameters of up to 20 microns, up to 15 microns, up to 10 microns, from 0.1 microns, from 0.5 microns or any combinations of these—e.g. from 0.1 microns to 20 microns or from 0.5 microns to 10 microns. In some embodiments, 80% or more, 90% or more or 95% or more of the particles with phage covalently attached have diameters of up to 20 microns, up to 15 microns, up to 10 microns, from 0.1 microns, from 0.5 microns or any combinations of these—e.g. from 0.1 microns to 20 microns or from 0.5 microns to 10 microns. WO2015118150 describes further the carrier particle that may be used for the bacteriophage formulation.

[0238] Particles for use in the application to which bacteriophage are immobilized by covalent bonding are generally substantially inert to the animal to be treated. In examples, nylon particles (beads) were used. Other inert, preferably non-toxic biocompatible material may be used. In addition, the particle may be made of a biodegradable material. Suitable materials include polymethyl methacrylate, polyethylene, ethylene/acrylate copolymer, nylon-12, polyurethane, silicone resin, silica and nylon 1010. WO2003093462 describes further materials that the particles may be made from.

[0239] Immobilization or attachment of bacteriophage to the particle substrate may be achieved by covalent bonds formed between the bacteriophage coat protein and the carrier substrate. Bacteriophage may also be immobilized to the substrate via their head, tail, or capsule by activating the substrate particle before the addition and bonding of bacteriophage. The term “activated/activating/activation” refers to the activation of the substrate such as electrically, e.g. by corona discharge, or by reacting said substrate with various chemical groups (leaving a surface chemistry able to bind viruses, such as bacteriophage head, tail or capsule group). WO2015118150, WO2003093462 and WO2007072049 describe further the activation of said substrate, coupling of phage to substrate, and details of methods for covalent attachment of phage to particles.

[0240] In some embodiments, the bacteriophage is formulated for delivery to mammalian skin, eyes, teeth, or implant. In some embodiments, the composition comprises the bacteriophage and a pharmaceutically or cosmetically acceptable excipient, wherein the bacteriophage and the excipient do not occur together in nature. In some embodiments, the composition comprises the bacteriophage and a pharmaceutically or cosmetically acceptable excipient, wherein the excipient is a non-naturally occurring excipient. In some embodiments, the composition comprises the bacteriophage encapsulated in a pharmaceutically or cosmetically acceptable polymer, wherein the polymer is a non-naturally occurring polymer. In some embodiments, the composition described herein may be encapsulated to facilitate a longer shelf life and storage of phage to ensure reproducible dosages, and to facilitate effective delivery to the desired site of action or adsorption. In some embodiments, the composition may be encapsulated in emulsions, ointments, polymeric or lipid microparticles (microspheres & microcrystals), nanoparticles, nanofibers, microfibers, membranes, thin film structures and/or liposomes. Natural and synthetic polymers may be used for phage encapsulation. Phage encapsulation may be performed using a variety of hydrophilic and hydrophobic polymers including but not limited to agarose, alginate, chitosan, pectin, whey protein, gelled milk protein, hyaluronic acid methacrylate, hydroxypropyl methyl cellulose (HPMC), poly (N-isopropylacrylamide), Poly (DL-lactide: glycolide), polyesteramide, polyvinyl pyrrolidone, polyethylene oxide/polyvinyl alcohol, cellulose diacetate, and/or polymethyl methacrylate. Examples of the materials that could be used for preparation of phages encapsulated in liposomes include, but are not limited to, phosphatidylcholine, cholesterol, Softisan 100™; soybean phosphatidylcholine, DOPC (1,2-dioleoyl-sn-glycero-3-phosphocholine), DOPS (1,2-diolcoyl-sn-glycero-3-phospho-L-serine), DLPC (1,2-Dilauroyl-sn-glycero-3-phosphorylcholine), Cholesterol-PEG 600, and/or cholesteryl esters. Solid-liquid particles for topical administration can be produced by solid lipids and adjuvants including, but not limited to, surfactants and emulsifiers, e.g., stearic acid, oleic acid, tripalmitin, cetyl alcohol, cetyl palmitate, tristearin, trimyristin, and hydrogenated vegetable fat (HVF), glyceryl behenate, glyceryl monostearate, glyceryl palmitostearate, glyceryl tripalmitate, sodium taurocholate, octadecyl alcohol, Tween 80, Poloxamer 188, Compritol® 888 ATO, Imwitor® 900, Precirol® ATO5, carnauba wax and isodecyl oleate, hydrogenate phosphatidylcholine, cholesterol. Malik et al., 2017; Bacteriophages Methods and Protocols 2018; and Das and Chaudhury, 2011 describe further materials and techniques for bacteriophage encapsulation.

[0241] In some embodiments, the composition is in single dosage form. Single dosage forms may be in a liquid, gel or cream form. Single dosage forms may be administered directly to a patient without modification or may be diluted or reconstituted prior to administration. Single dosage forms of the composition may be prepared by portioning the composition into smaller aliquots, single dose containers, single dose liquid forms, or single dose solid forms, such as tablets, granulates, nanoparticles, nanocapsules, microcapsules, microtablets, pellets, or powders. A single dose in a solid form may be reconstituted by adding liquid, typically sterile water or saline solution, or mixing with other dermal formulation components, prior to administration to a patient.

[0242] Dosage regimens may be adjusted to provide a therapeutic response. Dosing can depend on several factors, including severity and responsiveness of the disease, route of administration, time course of treatment (days to months to years), and time to amelioration of the condition. For example, a single bolus may be administered at one time, several divided doses may be administered over a predetermined period of time, or the dose may be reduced or increased as indicated by the therapeutic situation.

[0243] In some embodiments, the ingredients are supplied either separately or mixed together in unit dosage form. The pharmaceutical compositions may be packaged in a hermetically sealed container such as an ampoule or sachet indicating the quantity of the agent. In some embodiment, one or more of the pharmaceutical compositions is supplied as a dry sterilized lyophilized powder or water-free concentrate in a hermetically sealed container and can be reconstituted (e.g., with water or saline) to the appropriate concentration for administration to a subject. In some embodiments, one or more of the prophylactic or therapeutic agents or pharmaceutical compositions is supplied as a dry sterile lyophilized powder in a hermetically sealed container and reconstituted prior to administration. In some embodiments, the dry sterilized lyophilized powder is produced by spray-drying and can include a mixture of one of the following: 30-50% dextran, 40-70% sucrose, 0.5-2% tris, and 1-3% leucin; or 30-50% hydroxyethyl starch, 40-70% sucrose, 0.5-2% tris, and 1-3% leucine. Cryoprotectants can be included for a lyophilized dosage form, principally 0-10% sucrose (optimally 0.5-1.0%). Other suitable cryoprotectants include trehalose and lactose. Other suitable bulking agents include glycine and arginine, either of which can be included at a concentration of 0-0.05%, and polysorbate-80 (optimally included at a concentration of 0.005-0.01%). Additional surfactants include but are not limited to polysorbate 20 and BRIJ surfactants.

[0244] For injection, the active ingredients of the pharmaceutical composition may be formulated in aqueous solutions, preferably in physiologically compatible buffers such as Hank's solution, Ringer's solution, or physiological salt buffer. For transmucosal administration, penetrants appropriate to the barrier to be permeated are used in the formulation. Such penetrants are generally known in the art.

[0245] For oral administration, the pharmaceutical composition can be formulated readily by combining the active compounds with pharmaceutically acceptable carriers well known in the art. Such carriers enable the pharmaceutical composition to be formulated as tablets, pills, dragees, capsules, liquids, gels, syrups, slurries, suspensions, and the like, for oral ingestion by a patient. Pharmacological preparations for oral use can be made using a solid excipient, optionally grinding the resulting mixture, and processing the mixture of granules, after adding suitable auxiliaries if desired, to obtain tablets or dragee cores. Suitable excipients are, in particular, fillers such as sugars, including lactose, sucrose, mannitol, or sorbitol; cellulose preparations such as, for example, maize starch, wheat starch, rice starch, potato starch, gelatin, gum tragacanth, methyl cellulose, hydroxypropylmethyl-cellulose, sodium carbomethylcellulose; and/or physiologically acceptable polymers such as polyvinylpyrrolidone (PVP). If desired, disintegrating agents may be added, such as cross-linked polyvinyl pyrrolidone, agar, or alginic acid or a salt thereof such as sodium alginate.

[0246] Dragee cores are provided with suitable coatings. For this purpose, concentrated sugar solutions may be used which may optionally contain gum arabic, talc, polyvinyl pyrrolidone, carbopol gel, polyethylene glycol, titanium dioxide, lacquer solutions and suitable organic solvents or solvent mixtures. Dyestuffs or pigments may be added to the tablets or dragee coatings for identification or to characterize different combinations of active compound doses.

[0247] Pharmaceutical compositions which can be used orally, include push-fit capsules made of gelatin as well as soft, sealed capsules made of gelatin and a plasticizer, such as glycerol or sorbitol. The push-fit capsules may contain the active ingredients in admixture with filler such as lactose, binders such as starches, lubricants such as talc or magnesium stearate and, optionally, stabilizers. In soft capsules, the active ingredients may be dissolved or suspended in suitable liquids, such as fatty oils, liquid paraffin, or liquid polyethylene glycols. In addition, stabilizers may be added. All formulations for oral administration should be in dosages suitable for the chosen route of administration.

[0248] For buccal administration, the compositions may take the form of tablets or lozenges formulated in conventional manner.

[0249] For administration by nasal inhalation, the active ingredients for use according to some embodiments of the invention are conveniently delivered in the form of an aerosol spray presentation from a pressurized pack with the use of a suitable propellant, e.g., dichlorodifluoromethane, trichlorofluoromethane, dichloro-tetrafluoroethane or carbon dioxide. In the case of a pressurized aerosol, the dosage unit may be determined by providing a valve to deliver a metered amount. Capsules and cartridges of, e.g., gelatin for use in a dispenser may be formulated containing a powder mix of the compound and a suitable powder base such as lactose or starch.

[0250] The pharmaceutical composition described herein may be formulated for parenteral administration, e.g., by bolus injection or continuous infusion. Formulations for injection may be presented in unit dosage form, e.g., in ampoules or in multidose containers with optionally, an added preservative. The compositions may be suspensions, solutions or emulsions in oily or aqueous vehicles, and may contain formulatory agents such as suspending, stabilizing and/or dispersing agents.

[0251] Pharmaceutical compositions for parenteral administration include aqueous solutions of the active preparation in water-soluble form. Additionally, suspensions of the active ingredients may be prepared as appropriate oily or water based injection suspensions. Suitable lipophilic solvents or vehicles include fatty oils such as sesame oil, or synthetic fatty acids esters such as ethyl oleate, triglycerides or liposomes. Aqueous injection suspensions may contain substances, which increase the viscosity of the suspension, such as sodium carboxymethyl cellulose, sorbitol or dextran. Optionally, the suspension may also contain suitable stabilizers or agents which increase the solubility of the active ingredients to allow for the preparation of highly concentrated solutions.

[0252] Alternatively, the active ingredient may be in powder form for constitution with a suitable vehicle, e.g., sterile, pyrogen-free water based solution, before use.

[0253] The pharmaceutical composition of some embodiments of the invention may also be formulated in rectal compositions such as suppositories or retention enemas, using, e.g., conventional suppository bases such as cocoa butter or other glycerides.

[0254] Pharmaceutical compositions suitable for use in context of some embodiments of the invention include compositions wherein the active ingredients are contained in an amount effective to achieve the intended purpose. More specifically, a therapeutically effective amount means an amount of active ingredients (bacteriophage) effective to prevent, alleviate or ameliorate symptoms of a disorder (e.g., inflammatory bowel disease) or prolong the survival of the subject being treated.

[0255] Determination of a therapeutically effective amount is well within the capability of those skilled in the art, especially in light of the detailed disclosure provided herein.

[0256] For any preparation used in the methods of the invention, the therapeutically effective amount or dose can be estimated initially from in vitro and cell culture assays. For example, a dose can be formulated in animal models to achieve a desired concentration or titer. Such information can be used to more accurately determine useful doses in humans.

[0257] In some embodiments, the composition is delivered to a subject in need thereof so as to provide one or more bacteriophage in an amount corresponding to a multiplicity of infection (MOI) of about 1 to about 10. MOI is determined by assessing the approximate bacterial load in the site of infection, or using an estimate for a given type of disease and then providing phage in an amount calculated to give the desired MOI.

[0258] In some embodiments, MOI may be selected based on the “multiplicity of 10 rule,” which states that where there are on average in order of 10 phages adsorbed per bacterium, bacterial density reduces significantly (Abedon S T, 2009, Foodborne Pathog Dis 6:807-815; and Kasman L M, et al., 2002, J Virol 76:5557-5564); whereas lower-titer phage administration (e.g., using a MOI lower than 10) is unlikely to be successful (Goode D, et al., 2003, App Environ Microbiol 69:5032-5036; Kumari S, et al., 2010, J Infect Dev Ctries 4:367-377).

[0259] In other embodiments, the amount of phage (or combination of phages) is provided so as to reduce the amount of bacteria (e.g. Staphylococcus aureus) present on a defined size area of the skin by at least 5%, 10%, 20%, 30%, 40%, 50%, 60%, 70%, 80%, 90% or even 100%.

[0260] In certain embodiments, the bacteriophage described herein is administered to ameliorate at least one manifestation of atopic dermatitis (AD) in a subject and results in one or more symptoms or physical parameters of the condition or disorder to improve by at least about 5%, 10%, 20%, 30%, 40%, 50%, 60%, 70%, 80%, 90%, 95%, or more as compared to levels in an untreated or control subject. In some embodiments, the improvement is measured by comparing the symptom or physical parameter in a subject prior to and following administration of the bacteriophage. In some embodiments, the measurable physical parameter is a reduction in bacterial colony-forming unit (CFU) count or plaque-forming unit (PFU) count from a skin sample or blood sample of the subject.

[0261] Toxicity and therapeutic efficacy of the active ingredients described herein can be determined by standard pharmaceutical procedures in vitro, in cell cultures or experimental animals. The data obtained from these in vitro and cell culture assays and animal studies can be used in formulating a range of dosage for use in human. The dosage may vary depending upon the dosage form employed and the route of administration utilized. The exact formulation, route of administration and dosage can be chosen by the individual physician in view of the patient's condition. (See e.g., Fingl, et al., 1975, in “The Pharmacological Basis of Therapeutics,” Ch. 1 p.1).

[0262] Dosage amount and interval may be adjusted individually to provide levels of the active ingredient are sufficient to induce or suppress the biological effect (minimal effective concentration, MEC). The MEC will vary for each preparation but can be estimated from in vitro data. Dosages necessary to achieve the MEC will depend on individual characteristics and route of administration. Detection assays can be used to determine plasma concentrations.

[0263] Depending on the severity and responsiveness of the condition to be treated, dosing can be of a single or a plurality of administrations, with course of treatment lasting from several days to several weeks or until cure is effected or diminution of the disease state is achieved.

[0264] The amount of a composition to be administered will, of course, be dependent on the subject being treated, the severity of the affliction, the manner of administration, the judgment of the prescribing physician, etc.

[0265] Compositions of some embodiments of the invention may, if desired, be presented in a pack or dispenser device, such as an FDA approved kit, which may contain one or more unit dosage forms containing the active ingredient. The pack may, for example, comprise metal or plastic foil, such as a blister pack. The pack or dispenser device may be accompanied by instructions for administration. The pack or dispenser may also be accommodated by a notice associated with the container in a form prescribed by a governmental agency regulating the manufacture, use or sale of pharmaceuticals, which notice is reflective of approval by the agency of the form of the compositions or human or veterinary administration. Such notice, for example, may be of labeling approved by the U.S. Food and Drug Administration for prescription drugs or of an approved product insert. Compositions comprising a preparation of the invention formulated in a compatible pharmaceutical carrier may also be prepared, placed in an appropriate container, and labeled for treatment of an indicated condition, as is further detailed above.

[0266] Compositions described herein may comprise more than one phage strain. In one embodiment, the composition comprises 2 phage strains, 3 phage strains, 4 phage strains, 5 phage strains or more.

[0267] In one embodiment, the bacteriophage cocktails comprise a plurality of phages that target a single Staphylococcus aureus strain.

[0268] In one embodiment, the bacteriophage cocktails comprise a plurality of phages that target more than one Staphylococcus aureus strain.

[0269] Examples of particular combinations of phages are provided herein below.

[0270] The pharmaceutical compositions of the present invention also may be combined with one or more non-phage therapeutic and/or prophylactic agents, useful for the treatment and/or prevention of bacterial infections, as described herein and/or known in the art (e.g. one or more traditional antibiotic agents). Other therapeutic and/or prophylactic agents that may be used in combination with the phage(s) or phage product(s) of the invention include, but are not limited to, antibiotic agents, anti-inflammatory agents, antiviral agents, antifungal agents, or local anesthetic agents.

[0271] Standard or traditional antibiotic agents that can be administered with the bacteriophages described herein include, but are not limited to, amikacin, gentamicin, kanamycin, neomycin, netilmicin, paromomycin, rhodostreptomycin, streptomycin, tobramycin, apramycin, rifamycin, naphthomycin, mupirocin, geldanamycin, ansamitocin, carbacephems, imipenem, meropenem, ertapenem, faropenem, doripenem, panipenem/betamipron, biapenem, PZ-601, cephalosporins, cefacetrile, cefadroxil, cefalexin, cefaloglycin, cefalonium, cefaloridine, cefalotin, cefapirin, cefatrizine, cefazaflur, cefazedone, cefazolin, cefradine, cefroxadine, ceftezole, cefaclor, cefonicid, cefprozil, cefuroxime, cefuzonam, cefmetazole, cefotetan, cefoxitin, cefcapene, cefdaloxime, cefdinir, cefditoren, cefetamet, cefixime, cefmenoxime, cefteram, ceftibuten, ceftiofur, ceftiolene, ceftizoxime, ceftriaxone, cefoperazone, ceftazidime latamoxef, cefclidine, cefepime, cefluprenam, cefoselis, cefozopran, cefpirome, cefquinome, flomoxef. ceftobiprole, azithromycin, clarithromycin, dirithromycin, erythromycin, roxithromycin, aztreonam, pencillin and penicillin derivatives, actinomycin, bacitracin, colistin, polymyxin B, cinoxacin, flumequine, nalidixic acid, oxolinic acid, piromidic acid, pipemidic acid, rosoxacin, ciprofloxacin, enoxacin, fleroxacin, lomefloxacin, nadifloxacin, norfloxacin, ofloxacin, pefloxacin, rufloxacin, balofloxacin, gatifloxacin, grepafloxacin, levofloxacin, moxifloxacin, pazufloxacin, sparfloxacin, temafloxacin, tosufloxacin, clinafloxacin, garenoxacin, gemifloxacin, stifloxacin, trovalfloxacin, prulifloxacin, acetazolamide, benzolamide, bumetanide, celecoxib, chlorthalidone, clopamide, dichlorphenamide, dorzolamide, ethoxyzolamide, furosemide, hydrochlorothiazide, indapamide, mafendide, mefruside, metolazone, probenecid, sulfacetamide, sulfadimethoxine, sulfadoxine, sulfanilamides, sulfamethoxazole, sulfasalazine, sultiame, sumatriptan, xipamide, tetracycline, chlortetracycline, oxytetracycline, doxycycline, lymecycline, meclocycline, methacycline, minocycline, rolitetracycline, methicillin, nafcillin, oxacilin, cloxacillin, vancomycin, teicoplanin, clindamycin, co-trimoxazole, flucloxacillin, dicloxacillin, ampicillin, amoxicillin and any combination thereof.

[0272] Standard antifungal agents include amphotericin B such as liposomal amphotericin B and non-liposomal amphotericin B.

[0273] The present inventors further contemplate administering to the subject a probiotic which comprises “good” bacteria to occupy the niche left by the reduced “negative” bacteria. Such probiotic bacteria may comprise lactobacillus, saccharomyces boulardii, and/or Bifidobacterium.

[0274] The bacteiophages and bacteriophage cocktails of the invention can be used in anti-infective compositions for controlling the growth of bacteria, in particular Staphylococcus aureus, to prevent or reduce the incidence of nosocomial infections. The anti-infective compositions find use in reducing or inhibiting colonization or growth of bacterial on a surface contacted therewith. The bacteriophages of the invention may be incorporated into compositions that are formulated for application to biological surfaces, such as the skin and mucus membranes, as well as for application to non-biological surfaces.

[0275] Anti-infective formulations for use on biological surfaces include, but are not limited to, gels, creams, ointments, sprays, and the like. In particular embodiments, the anti-infective formulation is used to sterilize a surgical field, or the hands and/or exposed skin of healthcare workers and/or patients.

[0276] Anti-infective formulations for use on non-biological surfaces include sprays, solutions, suspensions, wipes impregnated with a solution or suspension and the like. In particular embodiments, the anti-infective formulation is used on solid surfaces in hospitals, nursing homes, ambulances, etc., including, e.g., appliances, countertops, and medical devices, hospital equipment. In preferred embodiments, the non-biological surface is a surface of a hospital apparatus or piece of hospital equipment. In particularly preferred embodiments, the non-biological surface is a surgical apparatus or piece of surgical equipment.

[0277] The present invention also encompasses diagnostic methods for determining the causative agent at the site of the bacterial infection. In certain embodiments, the diagnosis of the causative agent of a bacterial infection is performed by (i) culturing a sample from a patient, e.g., a skin sample, a tumor biopsy, stool sample or other sample appropriate for culturing the bacteria causing the infection; (ii) contacting the culture with one or more bacteriophages of the invention; and (iii) monitoring for evidence of cell growth and/or lysis of the culture. Because the activity of phages tends to be species or strain specific, susceptibility, or lack of susceptibility, to one or more phages of the invention can indicate the species or strain of bacteria causing the infection.

[0278] The sample may be a tissue biopsy or swab collected from the patient, or a fluid sample, such as blood, tears, or urine.

[0279] As used herein the term “about” refers to +10%.

[0280] The terms “comprises,” “comprising,” “includes,” “including,” “having” and their conjugates mean “including but not limited to.”

[0281] The term “consisting of” means “including and limited to.”

[0282] The term “consisting essentially of” means that the composition, method or structure may include additional ingredients, steps and/or parts, but only if the additional ingredients, steps and/or parts do not materially alter the basic and novel characteristics of the claimed composition, method or structure.

[0283] As used herein, the singular form “a,” “an,” and “the” include plural references unless the context clearly dictates otherwise. For example, the term “a compound” or “at least one compound” may include a plurality of compounds, including mixtures thereof.

[0284] Throughout this application, various embodiments of this invention may be presented in a range format. It should be understood that the description in range format is merely for convenience and brevity and should not be construed as an inflexible limitation on the scope of the invention. Accordingly, the description of a range should be considered to have specifically disclosed all the possible subranges as well as individual numerical values within that range. For example, description of a range such as from 1 to 6 should be considered to have specifically disclosed subranges such as from 1 to 3, from 1 to 4, from 1 to 5, from 2 to 4, from 2 to 6, from 3 to 6 etc., as well as individual numbers within that range, for example, 1, 2, 3, 4, 5, and 6. This applies regardless of the breadth of the range.

[0285] Whenever a numerical range is indicated herein, it is meant to include any cited numeral (fractional or integral) within the indicated range. The phrases “ranging/ranges between” a first indicate number and a second indicate number and “ranging/ranges from” a first indicate number “to” a second indicate number are used herein interchangeably and are meant to include the first and second indicated numbers and all the fractional and integral numerals therebetween.

[0286] As used herein the term “method” refers to manners, means, techniques and procedures for accomplishing a given task including, but not limited to, those manners, means, techniques and procedures either known to, or readily developed from known manners, means, techniques and procedures by practitioners of the chemical, pharmacological, biological, biochemical and medical arts.

[0287] When reference is made to particular sequence listings, such reference is to be understood to also encompass sequences that substantially correspond to its complementary sequence as including minor sequence variations, resulting from, e.g., sequencing errors, cloning errors, or other alterations resulting in base substitution, base deletion or base addition, provided that the frequency of such variations is less than 1 in 50 nucleotides, alternatively, less than 1 in 100 nucleotides, alternatively, less than 1 in 200 nucleotides, alternatively, less than 1 in 500 nucleotides, alternatively, less than 1 in 1000 nucleotides, alternatively, less than 1 in 5,000 nucleotides, alternatively, less than 1 in 10,000 nucleotides.

[0288] It is understood that any Sequence Identification Number (SEQ ID NO) disclosed in the instant application can refer to either a DNA sequence or a RNA sequence, depending on the context where that SEQ ID NO is mentioned, even if that SEQ ID NO is expressed only in a DNA sequence format or a RNA sequence format. Similarly, though some sequences are expressed in a RNA sequence format (e.g., reciting U for uracil), depending on the actual type of molecule being described, it can refer to either the sequence of a RNA molecule comprising a dsRNA, or the sequence of a DNA molecule that corresponds to the RNA sequence shown. In any event, both DNA and RNA molecules having the sequences disclosed with any substitutes are envisioned.

[0289] It is appreciated that certain features of the invention, which are, for clarity, described in the context of separate embodiments, may also be provided in combination in a single embodiment. Conversely, various features of the invention, which are, for brevity, described in the context of a single embodiment, may also be provided separately or in any suitable subcombination or as suitable in any other described embodiment of the invention. Certain features described in the context of various embodiments are not to be considered essential features of those embodiments unless the embodiment is inoperative without those elements.

[0290] Various embodiments and aspects of the present invention as delineated hereinabove and as claimed in the claims section below find experimental support in the following examples.

### EXAMPLES

[0291] Reference is now made to the following examples, which together with the above descriptions illustrate some embodiments of the invention in a non-limiting fashion.

[0292] Generally, the nomenclature used herein, and the laboratory procedures utilized in the present invention include molecular, biochemical, microbiological and recombinant DNA techniques. Such techniques are thoroughly explained in the literature. See, for example, “Molecular Cloning: A laboratory Manual” Sambrook et al., (1989); “Current Protocols in Molecular Biology” Volumes I-III Ausubel, R. M., ed. (1994); Ausubel et al., “Current Protocols in Molecular Biology,” John Wiley and Sons, Baltimore, Maryland (1989); Perbal, “A Practical Guide to Molecular Cloning,” John Wiley & Sons, New York (1988); Watson et al., “Recombinant DNA,” Scientific American Books, New York; Birren et al. (eds) “Genome Analysis: A Laboratory Manual Series,” Vols. 1-4, Cold Spring Harbor Laboratory Press, New York (1998); methodologies as set forth in U.S. Pat. Nos. 4,666,828; 4,683,202; 4,801,531; 5,192,659 and 5,272,057; “Cell Biology: A Laboratory Handbook,” Volumes I-III Cellis, J. E., ed. (1994); “Culture of Animal Cells-A Manual of Basic Technique” by Freshney, Wiley-Liss, N. Y. (1994), Third Edition; “Current Protocols in Immunology” Volumes I-III Coligan J. E., ed. (1994); Stites et al. (eds), “Basic and Clinical Immunology” (8th Edition), Appleton & Lange, Norwalk, CT (1994); Mishell and Shiigi (eds), “Selected Methods in Cellular Immunology,” W. H. Freeman and Co., New York (1980); available immunoassays are extensively described in the patent and scientific literature, see, for example, U.S. Pat. Nos. 3,791,932; 3,839,153; 3,850,752; 3,850,578; 3,853,987; 3,867,517; 3,879,262; 3,901,654; 3,935,074; 3,984,533; 3,996,345; 4,034,074; 4,098,876; 4,879,219; 5,011,771 and 5,281,521; “Oligonucleotide Synthesis” Gait, M. J., ed. (1984); “Nucleic Acid Hybridization” Hames, B. D., and Higgins S. J., eds. (1985); “Transcription and Translation” Hames, B. D., and Higgins S. J., eds. (1984); “Animal Cell Culture” Freshney, R. I., ed. (1986); “Immobilized Cells and Enzymes” IRL Press, (1986); “A Practical Guide to Molecular Cloning” Perbal, B., (1984) and “Methods in Enzymology” Vol. 1-317, Academic Press; “PCR Protocols: A Guide To Methods And Applications,” Academic Press, San Diego, CA (1990); Marshak et al., “Strategies for Protein Purification and Characterization-A Laboratory Course Manual” CSHL Press (1996); all of which are incorporated by reference as if fully set forth herein. Other general references are provided throughout this document. The procedures therein are believed to be well known in the art and are provided for the convenience of the reader. All the information contained therein is incorporated herein by reference.

### Example 1 Isolating and Characterizing Phage

### Materials and Methods

### Bacterial Targets Assembly, Bacteria Sequencing and Characterization:

[0293] An assembly of 120 bacterial isolates from injured human skin were obtained from ATCC, CCUG, BEI and IMHA bacterial repositories, and used for isolation of infecting phage: ATCC-HFH-30676, ATCC-NCTC 9318, BEI-HFH-29568, BEI-MRSA131, BEI-Sal263, BEI-Sa1303, BEI-SA1912, CCUG-10778, CCUG-17417, CCUG-30188 B, CCUG-35603, CCUG-38604, CCUG-47207, CCUG-49255, CCUG-56450, CCUG-60578, CCUG-68145, CCUG-7410, IHMA-2162980, IHMA-2163579, IHMA-2163598, IHMA-2163653, IHMA-2163681, IHMA-2163703, IHMA-2163709, IHMA-2163714, IHMA-2163719, IHMA-2164168, IHMA-2164169, IHMA-2164172, IHMA-2164173, IHMA-2164174, IHMA-2164178, IHMA-2164182, IHMA-2164188, IHMA-2164189, IHMA-2164190, IHMA-2164192, IHMA-2164194, IHMA-2164195, IHMA-2164196, IHMA-2164197, IHMA-2164201, IHMA-2164204, IHMA-2164205, IHMA-2164206, IHMA-2213861, IHMA-2213869, IHMA-2213905, IHMA-2213907, IHMA-2213918, IHMA-2213948, IHMA-2213965, IHMA-2213976, IHMA-2213985, IHMA-2213993, IHMA-2214003, IHMA-2221107, IHMA-2221108, IHMA-2221113, IHMA-2221115, IHMA-2221118, IHMA-2221119, IHMA-2221120, IHMA-2221124, MEI 40523500v.1 IHMA-2221125, IHMA-2221127, IHMA-2244260, IHMA-2244261, IHMA-2244269, IHMA-2244289, IHMA-2244311, IHMA-2244333, IHMA-2250008, IHMA-2262230, IHMA-2262285, IHMA-2262338, IHMA-2262342, IHMA-2262346, IHMA-2262355, IHMA-2262366, IHMA-2262373, IHMA-2262388, IHMA-2262396, IHMA-2262404, IHMA-2262410, IHMA-2262411, IHMA-2262414, IHMA-2262417, IHMA-2262418, IHMA-2262425, IHMA-2262426, IHMA-2262427, IHMA-2281017, IHMA-2281018, IHMA-2281019, IHMA-2281020, IHMA-2281021, IHMA-2281022, IHMA-2281024, IHMA-2281026, IHMA-2281027, IHMA-2281030, IHMA-2281031, IHMA-2311520, IHMA-2311525, IHMA-2311527, IHMA-2311529, IHMA-2311531, IHMA-2311535, IHMA-2311536, IHMA-2311547, IHMA-2311548, IHMA-2311549, IHMA-2311550, IHMA-2311552, IHMA-2311553, IHMA-2311568, and IHMA-2311588.

[0294] The isolates are well distributed across the Staphylococcus aureus phylogenetic trcc (FIG. 4). Each Staphylococcus aureus isolate was sequenced using Illumina Nextera sequencing of 150 bp paired-end reads. Adapter removal and quality trimming was done using Trimgalore (github(dot)com/FelixKrueger/TrimGalore) and cutadapt (Martin, 2011). Positions with phred scores below 30 were deleted from a read and reads shorter than 55 bp after removing low quality nucleotides were discarded entirely. Assembly was performed using SPAdes (Bankevich et al., 2012). Validation of Staphylococcus aureus taxonomy was done using pubmlst(dot)org/organisms/staphylococcus. Results were obtained by comparing the contigs of an assembly to known Staphylococcus species genomes hosted at refseq (www(dot)ncbi(dot)nlm(dot)nih(dot)gov/refseq/). Comparisons were performed using BLAST (Altschul, 1990) and the Staphylococcus species was determined from a phylogenetic tree derived from identities between known Staphyloccocus species, where the distance metric is mash (Ondov et al., 2016). The clonal complex and MLST of the bacterial isolates were determined by pubmlst(dot)org/organisms/staphylococcus-aureus.

### Phage Isolation, Amplification and Determination of Phage Titers

[0295] Phage were amplified from liquid broth or from soft agar double agar overlay plaque. Amplification from liquid broth was performed by diluting 50 μL of isolated phage sample at MOI 0.01 into 4 mL log phase host culture at OD=0.05, and incubating at 37 or 32° C. (mimicking skin temperature) overnight. When amplified from a plaque, a whole plaque was picked using a 1 μL loop and release the plaque into the culture OD₆₀₀=0.05. Tubes were centrifuged, the supernatant was filtered by 0.45 μm filter, and 1 mM of the divalent ions Ca²⁺ and Mg²⁺ were added.

[0296] Phage titers were determined by drop plaque assay as follows: host culture was prepared by inoculating 4 mL liquid BHIS with 5-10 colonies of the host and incubating at 37° C., until OD was 2 (16 hrs). 150 μL of host culture were added to 4 mL of molten top agar (BHIS top agar: BHIS media, 0.4% Agarose) with divalent ions Ca²⁺ and Mg²⁺ and dispensed on BHIS agar plats (1.6% Agarose). Plates were left to solidify for 15 min at RT before incubating the plate at 37° C. for 30 minutes. Then dilutions of phage sample were dropped (5 μL). Plates were incubated for overnight before counting plaques (10-50 plaques/drop) and determination of phage titer (number of plaques×200×reciprocal of counted dilution=PFU/mL).

### Solid Host Range

[0297] Solid host range was performed in the same manner as detailed in the above section (“Phage isolation, amplification and determination of phage titers” section). Following plaques enumeration (10-50 plaques/drop) and determination of phage titer/host, the Efficiency of Plating (EOP) was calculated as:

$$E O P = \frac{\frac{PFU}{mL} tested strain}{\frac{PFU}{mL} production host}$$

[0298] For sensitive/resistant determination, EOP above 0.1 (EOP >0.1) entitled the corresponding bacteria sensitive to the respective phage. The % coverage was determined based on the number of sensitive bacteria that were found sensitive as percent of the number of bacterial strains tested.

### Liquid Host Range:

[0299] Ten bacterial colonies of each tested strain were picked and transferred into a culture tube prefilled with 4 mL of liquid BHIS. Cultures were incubated to OD600≥1.5 by shaking, 180 rpm, at 37° C. for overnight (15-16 h). Bacterial cultures were diluted using BHIS supplemented with 1 mM MMC ions to reach a final OD600 of 0.05 and dispensed into a 96-well plate. Each phage was diluted to a concentration of 10 8 PFU/ml, and equal ratios were mixed to get cocktails combinations. Then, 10 μL of single or cocktail phages were added to the wells to a final concentration of 10 6 PFU/well. For “no phage control” (NPC), BHIS was added to the appropriate wells. Mineral oil was added to each well to reduce evaporation of the samples, and the plates were covered with sterile film to allow bacteria growth and keep the culture sterile. Plates were incubated for 24 hours in a plate reader at 37° C. with shaking, and OD600 was measured every 20 minutes. Two biological repeats were performed for the assay, and BHIS media supplemented with 1 mM MMC ions served as a blank.

[0300] For host range determination, a bacterial strain was defined as sensitive with respect to a phage if a decrease in OD600 values was observed (OD600<0.1) during the assay, even with mutants arising at the end of the assay.

[0301] For the assay assessing total clearance of the host, the same procedure as above was used except that the culture was left incubated for 24 h or 72 h at 37 or 32° C. Clearance was declared when the final OD600 was 0.2 or lower (also termed clearance threshold). No significance difference in host range was found between 37 and 32° C. The % coverage was determined based on the number of sensitive bacteria that were found sensitive as percent of the number of bacterial strains tested.

### Results

[0302] Staphylococcus aureus isolates from injured human skin were used to hunt phages. Phages were isolated from environmental samples (sewage), purified, and sequenced. Their taxonomy was deduced from the sequence based on International Committee on Taxonomy of Viruses (ICTV) classification (Table 2). Additionally, the sequence was used to determine the distance (sequence homology) between the phages (FIG. 1).

TABLE 2
Exemplary Isolated Bacteriophage against
Staphylococcus aureus species.

| Single letter | | | | SEQ |
|---|---|---|---|---|
| designation | Phage | Family | Genus | ID NO: |
| a | STA48-1 | Herelleviridae | Kayvirus | 1 |
| f | STA48-2 | Podoviridae | Rosenblumvirus | 2 |
| e | STA48-3 | Podoviridae | Rosenblumvirus | 3 |
| b | STA48-4 | Podoviridae | Rosenblumvirus | 4 |
| c | STA48-5 | Herelleviridae | Kayvirus | 5 |
| g | STA48-6 | Herelleviridae | Kayvirus | 6 |
| d | STA48-7 | Herelleviridae | Kayvirus | 7 |

TABLE 2.1
Exemplary Isolated Bacteriophage against
Staphylococcus aureus species.

| Single letter | | Deposit | Date of |
|---|---|---|---|
| designation | Phage | number | deposit |
| a | STA48-1 | F/00170 | 6 Dec. 2021 |
| f | STA48-2 | F/00171 | 6 Dec. 2021 |
| e | STA48-3 | F/00172 | 6 Dec. 2021 |
| b | STA48-4 | F/00173 | 6 Dec. 2021 |
| c | STA48-5 | F/00174 | 6 Dec. 2021 |
| g | STA48-6 | F/00175 | 6 Dec. 2021 |
| d | STA48-7 | F/00176 | 6 Dec. 2021 |

[0303] Specifically, Phage STA48-1 was deposited on Dec. 6, 2021, at the Polish Collection of micororganisms PCM), Institute of Immunology and Experimental Therapy, Polish Academy of Sciences, Ul. Weigla 12, 53-114 Wroclaw, Poland, with accession number F/00170.

[0304] Phage STA48-2 was deposited on Dec. 6, 2021, at the Polish Collection of micororganisms PCM), Institute of Immunology and Experimental Therapy, Polish Academy of Sciences, Ul. Weigla 12, 53-114 Wroclaw, Poland, with accession number F/00171.

[0305] Phage STA48-3 was deposited on Dec. 6, 2021, at the Polish Collection of micororganisms PCM), Institute of Immunology and Experimental Therapy, Polish Academy of Sciences, Ul. Weigla 12, 53-114 Wroclaw, Poland, with accession number F/00172.

[0306] Phage STA48-4 was deposited on Dec. 6, 2021, at the Polish Collection of micororganisms PCM), Institute of Immunology and Experimental Therapy, Polish Academy of Sciences, Ul. Weigla 12, 53-114 Wroclaw, Poland, with accession number F/00173.

[0307] Phage STA48-5 was deposited on Dec. 6, 2021, at the Polish Collection of micororganisms PCM), Institute of Immunology and Experimental Therapy, Polish Academy of Sciences, Ul. Weigla 12, 53-114 Wroclaw, Poland, with accession number F/00174.

[0308] Phage STA48-6 was deposited on Dec. 6, 2021, at the Polish Collection of micororganisms PCM), Institute of Immunology and Experimental Therapy, Polish Academy of Sciences, Ul. Weigla 12, 53-114 Wroclaw, Poland, with accession number F/00175.

[0309] Phage STA48-7 was deposited on Dec. 6, 2021, at the Polish Collection of micororganisms PCM), Institute of Immunology and Experimental Therapy, Polish Academy of Sciences, Ul. Weigla 12, 53-114 Wroclaw, Poland with accession number F/00176.

[0310] The % sequence homology (based on local BLAST) of the isolated phages was compared as set forth in FIG. 1.

[0311] The host ranges (HR) of the phages were tested. HR analysis of isolated phage was performed in solid assay as detailed above. The percent coverage of these isolated SA strains is summarized in Table 3, herein below.

TABLE 3

| Phage | % coverage |
|---|---|
| STA48-1 | 78.8% |
| STA48-2 | 40.7% |
| STA48-3 | 40.7% |
| STA48-4 | 51.7% |
| STA48-5 | 76.3% |
| STA48-6 | 72.9% |
| STA48-7 | 72.9% |

[0312] The host range of phages STA48-1 and STA48-7 was also assessed in the liquid assay based on the bacterial targets assembly (119 isolates) described above and was found to be 87.4% and 65.5% respectively, based on the sensitivity threshold as described above.

[0313] The combination of four phages STA48-1, STA48-7, STA48-5 and STA48-4 was used for clearance performance assessment in liquid according to the assay described above, based on the bacterial targets assembly (119 isolates) described above and yielded 87% clearance, i.e., 87% of the tested host strains were cleared by the phage combination, based on the clearance threshold as described above.

[0314] The three combinations in Table 4 below were assessed in the liquid clearance assay, based on a subgroup of 22 host strains. The achieved % clearance is detailed in table 4.

TABLE 4

| Phage 1 | Phage 2 | Phage 3 | Phage 4 | % clearance |
|---|---|---|---|---|
| STA48-1 | STA48-7 | STA48-5 | STA48-4 | 86% |
| STA48-6 | STA48-7 | STA48-5 | STA48-4 | 86% |
| STA48-1 | STA48-7 | STA48-6 | STA48-4 | 91% |

[0315] The host range of the phage was also profiled according to the clonal complex of the infected bacteria. The results are set forth in FIG. 2. A clonal complex instance where at least one bacterial member was found to be infected by the corresponding phage was marked “+.” In total, 7 clonal complexes were found to be infected by the phages, as specified in FIG. 2. The host range of the phage was also profiled according to the multilocus sequence typing (MLST) using mlst (github(dot)com/tseemann/mlst) which scans contigs against pubmlst (pubmlst(dot)org/). The results are set forth in FIG. 3. An MLST instance where at least one bacterial member was found to be infected by the corresponding phage was marked “+.”

### Example 2 Phage Combinations Selected According to Bacterial Coverage as Defined by Strain

[0316] For this example, the particular phages are referred to by the single letter designation in Table 2, herein above.

### 2 Phage Combinations

[0317] 2 phage combinations were analyzed in silico for their ability to lyse the 118 different strains of Staphylococcus aureus bacteria (as described for Example 1) based on the ability of the single phage to lyse the bacteria as assessed by a solid (EOP) assay. The alternative combinations sorted by the percentage number of infected bacterial strains are provided herein below. This trait is referred to as “at least 1 phage % coverage.” The number following each combination refers to the Percent trait performance—in this case the percent of the 119 strains that are targeted by the phage combination. The combinations are listed in descending performance grade.

[0318] Thus, for example, in the case of [ba;86], which provides the highest percent coverage of all the 2 phage combinations, STA48-4 and STA48-1 lysed 86% of all the strains of Staphylococcus aureus analyzed.

[0319] [ba;86] [cd;85] [da;85] [dg;85] [bc;85] [bg;84] [af;84] [cf;83] [bd;83] [ae;83] [ag;83] [ca; 82] [ge;81] [cc;81] [df;81] [de;80] [gf;80] [cg;79] [bf;65] [fe;59] [be;53].

[0320] The percent of host bacterial strains that are infected by two phages of a phage combination are provided. This trait is referred to as “at least 2 phage % coverage.” The phage combinations are ordered in descending performance grade.

[0321] Thus, for example, in the case of [ca;73], when STA48-5 and STA48-1 are used in a combination, 73% of the bacterial strains analyzed were targeted by both these phage.

[0322] [ca;73] [cg;70] [ag;69] [da;67] [cd;64] [dg;61] [ba;44] [bc;43] [bd;42] [bg;41] [be;39] [a e;36] [af;36] [ce;36] [cf;34] [de;34] [gf;34] [ge;32] [df;32] [bf;27] [fe;22].

3 Phage Combinations 3 phage combinations were analyzed in silico for their ability to lyse the 118 different strains of Staphylococcus aureus bacteria based on the ability of the single phage to lyse the bacteria as assessed by a solid (EOP) assay.

[0323] The combinations with their corresponding “at least 1 phage % coverage” are provided herein below. The number following each combination refers to the Percent trait performance. The phage combinations are ordered in descending performance grade. For example, in the case of [bdg;92], the combination that provided the highest percent coverage, STA48-4, STA48-7 and STA48-6 lysed 92% of all the strains of Staphylococcus aureus analyzed.

[0324] [bdg;92] [bcd;92] [bda;91] [dge;90] [bag;90] [cdf;90] [dgf;89] [cde;89] [bca;89] [baf;88] [dag;88] [daf;88] [dae;88] [bcg;87] [caf;87] [agf;87] [cda;87] [bcf;86] [bdf;86] [age;86] [bae;8 6] [cdg;86] [cae;86] [afe;86] [bce;85] [cgf;85] [bge;85] [bgf;85] [cfe;84] [cge;84] [dfe;84] [cag; 83] [bde;83] [gfe;83] [bfe;66].

[0325] The combinations with their corresponding “at least 2 phage % coverage” are provided herein below. The phage combinations are ordered in descending performance grade.

[0326] Thus, for example, in the case of [cag;78], when STA48-5, STA48-1 and STA48-6 are used in a combination, 78% of the bacterial strains analyzed were targeted by at least 2 of the 3 phages.

[0327] [cag;78] [cda; 77] [cdg;77] [dag;76] [cae;75] [bca;75] [caf;75] [age;75] [daf;74] [cge;74] [bag;74] [bcg;73] [bda;73] [agf;72] [cgf;72] [dae;71] [cdf;69] [bcd;69] [cde;68] [dgf;68] [bdg; 67] [dge;66] [bcf;60] [bgf;59] [baf;59] [bdf;56] [cfe;56] [afe;55] [gfe;54] [dfe;53] [bce;50] [bae; 50] [bde;50] [bge;49] [bfe;46].

[0328] The percent of host bacterial strains that are infected by three phages of a phage combination are provided. This trait is referred to as “at least 3 phage % coverage.” The phage combinations are ordered in descending performance grade.

[0329] Thus, for example, in the case of [cag;67], when STA48-5, STA48-1 and STA48-6 are used in a combination, 67% of the bacterial strains analyzed were targeted by each of the 3 phage.

[0330] [cag;67] [cda;64] [dag;60] [cdg;59] [bca;42] [bcg;41] [bda;40] [bag;40] [bcd;40] [bdg;3 8] [bae;35] [cae;35] [caf;34] [bce;34] [cgf;33] [agf;33] [cde;33] [dae;33] [cge;32] [bde;32] [bge; 31] [age;31] [daf;31] [cdf;31] [dge;31] [dgf;30] [baf;24] [bdf;22] [bcf;22] [bgf;21] [bfe;21] [afe; 19] [cfe; 18] [dfe; 18] [gfe; 17].

### 4 Phage Combinations

[0331] 4 phage combinations were analyzed in silico for their ability to lyse the 118 different strains of Staphylococcus aureus bacteria based on the ability of the single phage to lyse the bacteria as assessed by a solid (EOP) assay.

[0332] The combinations with their corresponding “at least 1 phage % coverage” are provided herein below. The phage combinations are ordered in descending performance grade.

[0333] For example, in the case of [bdag;93], the 4 phage combination that provided the highest percent coverage, STA48-4, STA48-7, STA48-1 and STA48-6 lysed 93% of all the strains of Staphylococcus aureus analyzed.

[0334] [bdag;93] [bdgf;93] [bcdf;93] [bdaf;92] [bcdg;92] [bdge;92] [bcda;92] [bcde;92] [bdae; 91] [bagf;91] [dgfe;91] [bcaf;91] [dagf;91] [cdaf;91] [cdfe;91] [dage;91] [cdae;90] [bcag;90] [b age;90] [cdge;90] [cdgf;90] [dafe;90] [bcae;89] [cdag;88] [bafe;88] [cafe;88] [bcgf;88] [agfe;8 8] [cagf;87] [bcge;87] [bdfe;86] [bcfe;86] [cage;86] [bgfe;86] [cgfe;86].

[0335] The combinations with their corresponding “at least 2 phage % coverage” are provided herein below. The phage combinations are ordered in descending performance grade.

[0336] Thus, for example, in the case of [bdag;81], when STA48-4, STA48-7, STA48-1 and STA48-6 are used in a combination, 81% of the bacterial strains analyzed were targeted by at least 2 of the 4 phage.

[0337] [bdag;81] [bcda;81] [cagf;81] [dage;81] [dagf;81] [cdaf;81] [cdae;81] [cdgf;80] [cage;8 0] [bcdg;80] [cdag;80] [bcag;80] [bcge;79] [bcgf;79] [bcae;79] [cdge;79] [cgfe;79] [bcaf;79] [b age;78] [agfe;78] [cafe;78] [bagf;78] [bdae;76] [bdaf;76] [dafe;76] [cdfe;75] [bcdf;75] [dgfe;74] [bcde;74] [bdge;73] [bdgf;73] [bafe;62] [bcfe;62] [bgfe;62] [bdfe;60].

[0338] The combinations with their corresponding “at least 3 phage % coverage” are provided herein below. The phage combinations are ordered in descending performance grade.

[0339] Thus, for example, in the case of [cdag;75], when STA48-5, STA48-7, STA48-1 and STA48-6 are used in a combination, 75% of the bacterial strains analyzed were targeted by at least 3 of the 4 phage.

[0340] [cdag;75] [cage;71] [bcag;70] [cagf;68] [cdaf;67] [bcda;66] [cdae;65] [dagf;64] [bdag; 64] [cdgf;64] [cdge;64] [bcdg;64] [dage;64] [bcaf;56] [bdaf;55] [bagf;54] [bcdf;53] [bcgf;53] [c afe; 53] [bdgf;53] [dafe;50] [agfe;50] [cgfe;49] [cdfe;48] [bcae;47] [dgfe;47] [bdae;46] [bage;4 6] [bcde;45] [bcge;44] [bcfe;44] [bafe;43] [bdge;43] [bdfe;42] [bgfe;42].

[0341] The percent of host strains that are infected by 4 phages of phage combinations is provided herein below. This trait is referred to herein as “at least 4 phage % coverage.” Thus, for example, in the case of [cdag;57], when STA48-5, STA48-7, STA48-1 and STA48-6 are used in a combination, 57% of the bacterial strains tested were targeted by each of the four phage.

[0342] [cdag;57] [bcda;40] [bcag;40] [bdag;38] [bcdg;38] [cdae;33] [cagf;33] [bcae;33] [cage; 31] [bcge;31] [bcde;31] [bdae;31] [bage;31] [cdge;31] [cdaf;31] [dage;31] [cdgf;30] [dagf;30] [bdge;30] [bcaf;22] [bagf;21] [bcgf;21] [bdaf;20] [bcdf;20] [bdgf;19] [bafe; 19] [cafe; 18] [bcfe; 1 7] [bdfe;17] [cgfe; 17] [agfe; 17] [cdfe; 17] [dafe; 17] [bgfe; 16] [dgfe; 16].

### 5 Phage Combinations

[0343] 5 phage combinations were analyzed in silico for their ability to lyse the 118 different strains of Staphylococcus aureus bacteria based on the ability of the single phage to lyse the bacteria as assessed by a solid (EOP) assay.

[0344] The combinations with their corresponding “at least 1 phage % coverage” are provided herein below. The number following each combination refers to the Percent trait performance—in this case the percent of the 119 strains that are targeted by the phage combination. The phage combinations are ordered in descending performance grade.

[0345] For example, in the case of [bdagf;94], the 5 phage combination that provided the highest percent coverage, STA48-4, STA48-7, STA48-1, STA48-6 and STA48-2 lysed 94% of all the strains of Staphylococcus aureus analyzed.

[0346] [bdagf; 94] [bcdaf;94] [bcdfe;93] [bdgfe;93] [bdage;93] [bcdag;93] [bcdgf;93] [bcdge; 92] [bdafe;92] [bcdac;92] [dagfe;92] [cdafe;92] [bcagf;91] [bcafe;91] [bagfe;91] [cdagf;91] [cd age;91] [cdgfe;91] [bcage;90] [bcgfe;88] [cagfe;88].

[0347] The combinations with their corresponding “at least 2 phage % coverage” are provided herein below. The phage combinations are ordered in descending performance grade.

[0348] Thus, for example, in the case of [bdagf; 84], when STA48-4, STA48-7, STA48-1, STA48-6 and STA48-2 are used in a combination, 84% of the bacterial strains tested were targeted by at least 2 of the 5 phage.

[0349] [bdagf;84] [dagfe;84] [cdgfe;84] [bdage;84] [cdagf;84] [bcdgf;84] [bcdge;84] [bcagf;8 4] [bcdae;84] [bcage;83] [cdafe;83] [bcdaf;83] [bcdag;83] [cagfe;83] [cdage;82] [bcgfe;81] [bc afe;80] [bagfe;80] [bdafe;78] [bdgfe;75] [bcdfe;75].

[0350] The combinations with their corresponding “at least 3 phage % coverage” are provided herein below. The phage combinations are ordered in descending performance grade.

[0351] Thus, for example, in the case of [cdage; 76], when STA48-5, STA48-7, STA48-1, STA48-6 and STA48-3 are used in a combination, 76% of the bacterial strains tested were targeted by at least 3 of the 5 phage.

[0352] [cdage; 76] [bcdag;76] [cdagf;75] [cagfe;73] [bcage; 73] [bcagf;72] [bcdaf;71] [cdafe;7 0] [bcdae;69] [dagfe;69] [bdage;69] [bdagf;69] [bcdgf;67] [cdgfe;67] [bcdge;66] [bcafe;60] [ba gfe;59] [bcdfe;59] [bcgfe;59] [bdafe;57] [bdgfe;57].

[0353] The combinations with their corresponding “at least 4 phage % coverage” are provided herein below. The phage combinations are ordered in descending performance grade.

[0354] Thus, for example, in the case of [cdagf;63], when STA48-5, STA48-7, STA48-1, STA48-6 and STA48-2 are used in a combination, 63% of the bacterial strains analyzed were targeted by at least 4 of the 5 phage.

[0355] [cdagf;63] [cdage;62] [bcdag;62] [bcagf;53] [bcdaf;52] [bdagf;51] [bcdgf;51] [cagfe;4 8] [cdafe;47] [dagfe;46] [cdgfe;46] [bcage;44] [bcdae;43] [bcdge;42] [bdage;42] [bcafe;41] [bd afe;40] [bagfe;39] [bcdfe;38] [bcgfe;38] [bdgfe;37].

### Example 3 Phage Combinations Selected According to Host Coverage as Classified by Bacterial Clonal Complex

[0356] For this example, the particular phages are referred to by the single letter designation in Table 2, herein above.

### 2 Phage Combinations

[0357] 2 phage combinations were analyzed in silico for their ability to lyse the 118 different strains of Staphylococcus aureus bacteria as profiled by their clonal complex, based on the ability of the single phage to lyse a bacteria of a particular clonal complex as assessed by a solid (EOP) assay.

[0358] All the combinations below were found to cover 100% of the clonal complexes associated with the 119 bacterial strains. This trait is referred to as “at least 1 phage % coverage.” The number following each combination refers to the Percent trait performance—in this case the percent of bacteria strains as profiled by their clonal complex that are targeted by the phage combination.

[0359] [bc; 100] [bd; 100] [ba; 100] [bg; 100] [bf; 100] [be; 100] [cd; 100] [ca; 100] [cg; 100] [cf; 10 0] [ce; 100] [da; 100] [dg; 100] [df; 100] [de; 100] [ag; 100] [af; 100] [ae; 100] [gf; 100] [ge; 100] [fe; 100].

[0360] The percent of host bacterial strains (as profiled by their clonal complex) that are infected by two phages of a phage combination are provided. This trait is referred to as “at least 2 phage % coverage.” The phage combinations are ordered in descending performance grade.

[0361] [bc; 100] [cg;100] [ba; 100] [bg; 100] [ag; 100] [cd; 100] [ca; 100] [dg; 100] [da; 100] [bd; 1 00] [bf;86] [be;86] [ce;86] [cf;86] [df;86] [de;86] [af;86] [ae;86] [gf;86] [ge;86] [fe;71].

### 3 Phage Combinations

[0362] 3 phage combinations were analyzed in silico for their ability to lyse the 118 different strains of Staphylococcus aureus bacteria as profiled by their clonal complex, based on the ability of the single phage to lyse a bacteria of a particular clonal complex as assessed by a solid (EOP) assay.

[0363] All the combinations below were found to cover 100% of the clonal complexes associated with the 119 bacterial strains. This trait is referred to as “at least 1 phage % coverage.” The number following each combination refers to the Percent trait performance—in this case the percent of bacteria strains as profiled by their clonal complex that are targeted by the phage combination.

[0364] [bcd; 100] [bag; 100] [bcg; 100] [bcf; 100] [bce; 100] [bda; 100] [bdg; 100] [bdf; 100] [cdg; 100][bca; 100] [baf; 100] [bae; 100] [bgf; 100] [bge; 100] [bfe; 100] [cda; 100] [bde; 100] [cdf; 100] [daf; 100] [dac; 100] [caf; 100] [cae; 100] [cgf; 100] [cge; 100] [cfe; 100] [dag; 100] [cde; 100] [cag; 100][dgf;100] [dge; 100] [dfe; 100] [agf; 100] [age; 100] [afe; 100] [gfe; 100].

[0365] The percent of host bacterial strains (as profiled by their clonal complex) that are infected by two phages of a phage combination are provided below. This trait is referred to as “at least 2 phage % coverage.” All the combinations below were found to have “at least 2 phage % coverage” that equals 100%.

[0366] [bcd; 100] [bag; 100] [bcg; 100] [bcf; 100] [bcc; 100] [bda; 100] [bdg; 100] [bdf; 100] [cdg; 100][bca; 100] [baf; 100] [bac; 100] [bgf; 100] [bge; 100] [bfc; 100] [cda; 100] [bde; 100] [cdf; 100] [daf; 100] [dac; 100] [caf; 100] [cac; 100] [cgf; 100] [cge; 100] [cfe; 100] [dag; 100] [cde; 100] [cag; 100][dgf;100] [dge; 100] [dfc; 100] [agf; 100] [age; 100] [afc; 100] [gfc; 100].

[0367] The percent of host bacterial strains (as profiled by their clonal complex) that are infected by three phages of a phage combination are provided below. This trait is referred to as “at least 3 phage % coverage.” The phage combinations are ordered in descending performance grade.

[0368] [bcd; 100] [cdg; 100] [cag; 100] [bcg; 100] [bda; 100] [bdg; 100] [bca; 100] [bag; 100] [dag; 100] [cda; 100] [baf;86] [bdf;86] [bac;86] [bgf;86] [bcc;86] [bcf;86] [bgc;86] [bde;86] [cdf;86] [daf;86] [agc;86] [agf;86] [dgc;86] [dgf;86] [cde;86] [dac;86] [cgc;86] [cgf;86] [cac;86] [caf;86] [afc;71] [dfe;71] [cfe;71] [bfc;71] [gfc;71].

### 4 Phage Combinations

[0369] 4 phage combinations were analyzed in silico for their ability to lyse the 118 different strains of Staphylococcus aureus bacteria as profiled by their clonal complex, based on the ability of the single phage to lyse a bacteria of a particular clonal complex as assessed by a solid (EOP) assay.

[0370] All combinations that are provided herein below yield 100% coverage by at least one phage of the combination (as profiled by their clonal complex). This trait is referred to as “at least 1 phage % coverage.” The number following each combination refers to the Percent trait performance—in this case the percent of bacteria strains as profiled by their clonal complex that are targeted by the phage combination.

[0371] [bcda; 100] [bcfc; 100] [bcdf; 100] [bcde; 100] [bcag; 100] [bcaf; 100] [bcac; 100] [bcgf; 1 00] [bagf; 100] [bcdg; 100] [bdag; 100] [bdaf; 100] [bdac; 100] [bdgf; 100] [bdge; 100] [bdfe; 100] [bcge; 100] [bage; 100] [cagf; 100] [cage; 100] [cdag; 100] [cdaf; 100] [cdac; 100] [cdgf; 100] [cdg c; 100] [cdfe; 100] [bafc; 100] [bgfc; 100] [cafe; 100] [cgfe; 100] [dagf; 100] [dage; 100] [dafe; 100 ][dgfc; 100] [agfc; 100].

[0372] The percent of host bacterial strains (as profiled by their clonal complex) that are infected by two phages of a phage combination are provided below. This trait is referred to as “at least 2 phage % coverage.” The phage combinations below all yield 100% coverage.

[0373] [bcda; 100] [bcfc; 100] [bcdf; 100] [bcde; 100] [bcag; 100] [bcaf; 100] [bcae; 100] [bcgf; 1 00] [bagf; 100] [bcdg; 100] [bdag; 100] [bdaf; 100] [bdac; 100] [bdgf; 100] [bdge; 100] [bdfe; 100] [bcgc; 100] [bage; 100] [cagf; 100] [cage; 100] [cdag; 100] [cdaf; 100] [cdae; 100] [cdgf; 100] [cdg c; 100] [cdfc; 100] [bafe; 100] [bgfe; 100] [cafe; 100] [cgfc; 100] [dagf; 100] [dage; 100] [dafe; 100][dgfc; 100] [agfe; 100].

[0374] The percent of host bacterial strains (as profiled by their clonal complex) that are infected by three phages of a phage combination are provided below. This trait is referred to as “at least 3 phage % coverage.” The phage combinations below all yield 100% coverage.

[0375] [bcda; 100] [bcfc; 100] [bcdf; 100] [bcde; 100] [bcag; 100] [bcaf; 100] [bcae; 100] [bcgf; 1 00] [bagf; 100] [bcdg; 100] [bdag; 100] [bdaf; 100] [bdac; 100] [bdgf; 100] [bdge; 100] [bdfe; 100] [bcge; 100] [bage; 100] [cagf; 100] [cage; 100] [cdag; 100] [cdaf; 100] [cdac; 100] [cdgf; 100] [cdg c; 100] [cdfe; 100] [bafe; 100] [bgfe; 100] [cafe; 100] [cgfe; 100] [dagf; 100] [dage; 100] [dafe; 100] [dgfc; 100] [agfe; 100].

[0376] The percent of host bacterial strains (as profiled by their clonal complex) that are infected by four phages of a phage combination are provided below. This trait is referred to as “at least 4 phage % coverage.” The phage combinations are ordered in descending performance grade.

[0377] [bcda; 100] [bdag; 100] [bcag; 100] [bcdg; 100] [cdag; 100] [bdgf; 86] [bdac;86] [bdaf;86][bdgc;86] [cagf;86] [bcgf;86] [bcac;86] [bcaf;86] [bcde;86] [bcdf;86] [bcge;86] [bagf;86] [bag c;86] [dage;86] [dagf;86] [cdaf;86] [cdac;86] [cdgf;86] [cdge;86] [cage;86] [bgfe;71] [cdfc;71] [bdfe;71] [bcfc;71] [dgfe;71] [bafe;71] [cafe;71] [cgfe;71] [dafe;71 | agfe;71].

### 5 Phage Combinations

[0378] 5 phage combinations were analyzed in silico for their ability to lyse the 118 different strains of Staphylococcus aureus bacteria as profiled by their clonal complex, based on the ability of the single phage to lyse a bacteria of a particular clonal complex as assessed by a solid (EOP) assay.

[0379] The combinations that lyse the highest number of bacterial strains (as profiled by their clonal complex) are provided herein below. This trait is referred to as “at least 1 phage % coverage.” The number following each combination refers to the Percent trait performance—in this case the percent of bacteria strains as profiled by their clonal complex that are targeted by the phage combination. The phage combinations below all yield 100% coverage.

[0380] [bcdag; 100] [bcdaf; 100] [bcdae; 100] [bcdgf; 100] [bcdge; 100] [bcdfe; 100] [bcagf; 100] [bcage; 100] [bcafe; 100] [bcgfe; 100] [bdagf; 100] [bdage; 100] [bdafe; 100] [bdgfe; 100] [bagfe; 100] [cdagf; 100] [cdage; 100] [cdafe; 100] [cdgfe; 100] [cagfe; 100] [dagfe; 100].

[0381] The percent of host bacterial strains (as profiled by their clonal complex) that are infected by two phages of a phage combination are provided below. This trait is referred to as “at least 2 phage % coverage.” The phage combinations below all yield 100% coverage.

[0382] [bcdag; 100] [bcdaf; 100] [bcdae; 100] [bcdgf; 100] [bcdge; 100] [bcdfe; 100] [bcagf; 100] [bcage; 100] [bcafe; 100] [bcgfe; 100] [bdagf; 100] [bdage; 100] [bdafe; 100] [bdgfe; 100] [bagfe; 100] [cdagf; 100] [cdage; 100] [cdafe; 100] [cdgfe; 100] [cagfe; 100] [dagfe; 100].

[0383] The percent of host bacterial strains (as profiled by their clonal complex) that are infected by three phages of a phage combination are provided below. This trait is referred to as “at least 3 phage % coverage.” The phage combinations below all yield 100% coverage.

[0384] [bcdag; 100] [bcdaf; 100] [bcdae; 100] [bcdgf; 100] [bcdge; 100] [bcdfe; 100] [bcagf; 100] [bcage; 100] [bcafe; 100] [bcgfe; 100] [bdagf; 100] [bdage; 100] [bdafe; 100] [bdgfe; 100] [bagfe; 100] [cdagf; 100] [cdage; 100] [cdafe; 100] [cdgfe; 100] [cagfe; 100] [dagfe; 100].

[0385] The percent of host bacterial strains (as profiled by their clonal complex) that are infected by four phages of a phage combination are provided below. This trait is referred to as “at least 4 phage % coverage.” The phage combinations below all yield 100% coverage.

[0386] [bcdag; 100] [bcdaf; 100] [bcdae; 100] [bcdgf; 100] [bcdge; 100] [bcdfe; 100] [bcagf; 100] [bcage; 100] [bcafe; 100] [bcgfe; 100] [bdagf; 100] [bdage; 100] [bdafe; 100] [bdgfe; 100] [bagfe; 100] [cdagf; 100] [cdage; 100] [cdafe; 100] [cdgfe; 100] [cagfe; 100] [dagfe; 100].

### Example 4 Phage Combinations Selected According to Host Coverage as Classified by Bacterial MLST

[0387] For this example, the particular phages are referred to by the single letter designation in Table 2, herein above.

### 2 Phage Combinations

[0388] 2 phage combinations were analyzed in silico for their ability to lyse the 118 different strains of Staphylococcus aureus bacteria as classified by MLST, based on the ability of the single phage to lyse a bacteria of a particular MLST as assessed by a solid (EOP) assay.

[0389] The combinations that lyse the highest number of bacterial strains (as classified by MLST) are provided herein below. This trait is referred to as “at least 1 phage % coverage.” The number following each combination refers to the Percent trait performance—in this case the percent of bacteria strains as profiled by their MLSTs that are targeted by the phage combination. The combinations are listed in descending performance grade.

[0390] [bd;96] [ae;96] [de;96] [da;96] [ba;96] [bc;93] [af;93] [df;93] [ce;93] [cd;89] [ag;89] [ca; 89] [dg;89] [cf;89] [bg;85] [ge;85] [cg;81] [gf;81] [bf;67] [fe;67] [be;59].

[0391] The percent of host bacterial strains (as classified by MLST) that are infected by at least two phages of a phage combination are provided. This trait is referred to as “at least 2 phage % coverage.” The phage combinations are ordered in descending performance grade.

[0392] [ca;81] [da;81] [cd;81] [cg;74] [ag;74] [dg;74] [ba;48] [bd;48] [be;48] [bc;44] [de;44] [b g;44] [ae;44] [ce;41] [df;41] [af;41] [ge;41] [cf;37] [gf;37] [bf;33] [fe;30].

### 3 Phage Combinations

[0393] 3 phage combinations were analyzed in silico for their ability to lyse the 118 different strains of Staphylococcus aureus bacteria as classified by MLST, based on the ability of the single phage to lyse a bacteria of a particular clonal complex as assessed by a solid (EOP) assay.

[0394] The combinations that lyse the highest number of bacterial strains (as classified by MLST) are provided herein below. This trait is referred to as “at least 1 phage % coverage.” The number following each combination refers to the Percent trait performance—in this case the percent of bacteria strains as profiled by their MLSTs that are targeted by the phage combination. The combinations are listed in descending performance grade.

[0395] [bda; 100] [dae; 100] [dge;96] [afe;96] [bdg;96] [bdf;96] [bde;96] [bag;96] [baf;96] [bae; 96] [age;96] [cda;96] [bca;96] [cde;96] [daf;96] [dag;96] [cae;96] [dfe;96] [bcd;96] [bcg;93] [bc f;93] [bce;93] [caf;93] [cdf;93] [cfe;93] [agf;93] [dgf;93] [cge;93] [cgf;89] [cag;89] [cdg;89] [bg e;85] [bgf;85] [gfe;85] [bfe;67].

[0396] The percent of host bacterial strains (as classified by MLST) that are infected by at least two phages of a phage combination are provided below. This trait is referred to as “at least 2 phage % coverage.” The phage combinations are ordered in descending performance grade.

[0397] [bda;89] [daf; 89] [dac;89] [bcd;85] [cac;85] [cde;85] [bca;85] [caf;85] [cdf;85] [cdg;81] [dag;81] [cda;81] [cag;81] [bdg;78] [agf;78] [dgf;78] [age;78] [bag;78] [dge;78] [bcg;74] [cge;7 4] [cgf;74] [bdf;63] [gfc;63] [bgf;63] [dfe;63] [bcf;63] [afc;63] [baf;63] [cfe;63] [bce;59] [bae;5 9] [bge;59] [bde;59] [bfc;59].

[0398] The percent of host bacterial strains (as classified by MLST) that are infected by three phages of a phage combination are provided below. This trait is referred to as “at least 3 phage % coverage.” The phage combinations are ordered in descending performance grade.

[0399] [cda;81] [cdg;74] [cag;74] [dag;74] [bda;44] [bag;44] [bcd;44] [bcg;44] [bca;44] [bdg;4 4] [cgc;41] [dac;41] [bde;41] [age;41] [bac;41] [dge;41] [cde;41] [cac;41] [caf;37] [daf;37] [bge; 37] [dgf;37] [agf;37] [cdf;37] [cgf;37] [bce;37] [baf;30] [bdf;30] [bcf;26] [dfc;26] [afe;26] [bgf; 26] [bfc;26] [cfe;22] [gfc;22].

### 4 Phage Combinations

[0400] 4 phage combinations were analyzed in silico for their ability to lyse the 118 different strains of Staphylococcus aureus bacteria as classified by MLST, based on the ability of the single phage to lyse a bacteria of a particular MLST as assessed by a solid (EOP) assay.

[0401] The combinations that lyse the highest number of bacterial strains (as classified by MLST) are provided herein below. This trait is referred to as “at least 1 phage % coverage.” The number following each combination refers to the Percent trait performance—in this case the percent of bacteria strains as profiled by their MLSTs that are targeted by the phage combination. The combinations are listed in descending performance grade.

[0402] [bcda; 100] [dafc; 100] [dage; 100] [cdac; 100] [bdac; 100] [bdaf; 100] [bdag; 100] [bcag;9 6] [bcac;96] [bcdf;96] [bcde;96] [bdge;96] [bcaf;96] [agfc;96] [bdgf;96] [bdfc;96] [bagf;96] [ba ge;96] [bafc;96] [cdge;96] [cdag;96] [dgfe;96] [cdfc;96] [cdaf;96] [bcdg;96] [cage;96] [cafe;96] [dagf;96] [bcge;93] [bcgf;93] [bcfc;93] [cgfc;93] [cdgf;93] [cagf;93] [bgfc;85].

[0403] The percent of host bacterial strains (as classified by MLST) that are infected by two phages of a phage combination are provided below. This trait is referred to as “at least 2 phage % coverage.” The phage combinations are ordered in descending performance grade.

[0404] [bcac;93] [bcde;93] [bdac;93] [cdfc;89] [bdag;89] [bcaf;89] [dagf;89] [cafc;89] [bcdf;8 9] [bcda;89] [cdaf;89] [bdaf;89] [cdac;89] [dage;89] [dafc;89] [bcge;85] [bdge;85] [cagf;85] [bc ag;85] [cdgf;85] [bage;85] [cagc;85] [bcdg;85] [cdge;85] [bagf;81] [dgfc;81] [agfe;81] [bdgf;8 1] [bcgf;81] [cgfc;81] [cdag;81] [bafe;67] [bdfe;67] [bcfc;67] [bgfc;67].

[0405] The percent of host bacterial strains (as classified by MLST) that are infected by three phages of a phage combination are provided below. This trait is referred to as “at least 3 phage % coverage.” The phage combinations are ordered in descending performance grade.

[0406] [bcda;81] [cdac;81] [cdag;81] [cdaf;81] [cdge;74] [bdag;74] [cdgf;74] [dagf;74] [cage; 74] [bcdg;74] [bcag;74] [cagf;74] [dage;74] [bdaf;63] [dafc;63] [bcdf;59] [agfe;59] [bcaf;59] [b dgf;59] [cafe;59] [bagf;59] [dgfe;59] [cdfe;59] [cgfe;56] [bcfc;56] [bdfe;56] [bcgf;56] [bgfe;56] [bafe;56] [bdac;56] [bdge;52] [bcde;52] [bcac;52] [bage;52] [bcge;48].

[0407] The percent of host bacterial strains (as profiled by MLST) that are infected by four phages of a phage combination are provided below. This trait is referred to as “at least 4 phage % coverage.” The phage combinations are ordered in descending performance grade.

[0408] [cdag;74] [bcda;44] [bdag;44] [bcag;44] [bcdg;44] [dage;41] [cdac;41] [cdge;41] [cage; 41] [cagf;37] [cdgf;37] [bcge;37] [bdge;37] [bcde;37] [bcac;37] [bage;37] [dagf;37] [bdae;37] [cdaf;37] [bdgf;26] [bdaf;26] [bagf;26] [bcdf;26] [bcaf;26] [bcgf;26] [dafe;22] [cgfc;22] [bafe;2 2] [bdfe;22] [dgfc;22] [agfe;22] [cdfe;22] [cafe;22] [bcfc; 19] [bgfc; 19].

### 5 Phage Combinations

[0409] 5 phage combinations were analyzed in silico for their ability to lyse the 118 different strains of Staphylococcus aureus bacteria as classified by MLST, based on the ability of the single phage to lyse a bacteria of a particular MLST as assessed by a solid (EOP) assay.

[0410] The combinations that lyse the highest number of bacterial strains (as classified by MLST) are provided herein below. This trait is referred to as “at least 1 phage % coverage.” The number following each combination refers to the Percent trait performance—in this case the percent of bacteria strains as profiled by their clonal complex that are targeted by the phage combination. The combinations are listed in descending performance grade.

[0411] [bcdag; 100] [cdafe; 100] [cdage; 100] [bdafe; 100] [bdage; 100] [bdagf; 100] [bcdac; 100] [dagfc; 100] [bcdaf; 100] [bagfe;96] [cagfc;96] [cdgfe;96] [bcdgf;96] [cdagf;96] [bcafe;96] [bd gfc;96] [bcdge;96] [bcdfe;96] [bcagf;96] [bcage;96] [begfe;93].

[0412] The percent of host bacterial strains (as classified by MLST) that are infected by at least two phages of a phage combination are provided below. This trait is referred to as “at least 2 phage % coverage.” The phage combinations are ordered in descending performance grade.

[0413] [bcafe;93] [bcdfe;93] [bdafe;93] [bdage;93] [bcdac;93] [bcage;93] [bcdge;93] [cagfe;8 9] [cdgfc;89] [bcdgf;89] [cdagf;89] [bcdag;89] [bcagf;89] [bcdaf;89] [dagfc;89] [bdagf;89] [cd age;89] [cdafc;89] [bdgfe;85] [bagfe;85] [bcgfc;85].

[0414] The percent of host bacterial strains (as classified by MLST) that are infected by at least three phages of a phage combination are provided below. This trait is referred to as “at least 3 phage % coverage.” The phage combinations are ordered in descending performance grade.

[0415] [cdafc;89] [bcdac;89] [bcdaf;89] [bcdag;81] [cdagf;81] [cdage;81] [bdage;81] [bdagf;8 1] [dagfc;81] [cagfc;78] [bcage;78] [bcagf;78] [cdgfc;78] [bcdge;78] [bcdgf;78] [bcafe;63] [ba gfe;63] [bdgfc;63] [bcdfe;63] [bdafe;63] [bcgfe;63].

[0416] The percent of host bacterial strains (as classified by MLST) that are infected by at least four phages of a phage combination are provided below. This trait is referred to as “at least 4 phage % coverage.” The phage combinations are ordered in descending performance grade.

[0417] [bcdag;74] [cdage;74] [cdagf;74] [cdafe;56] [bdafe;56] [cagfe;56] [bdagf;56] [cdgfc;5 6] [dagfc;56] [bcdgf;56] [bcdaf;56] [bcagf;56] [bdgfe;52] [bagfc;52] [bcafe;52] [bcdfc;52] [bcd ge;48] [bcage;48] [bcdac;48] [bdage;48] [bcgfc;48].

### Example 5 Synergic Increased TTM Achieved by a Phage Cocktail

[0418] To test the effect on the time till appearance of resistant mutant bacteria (“time to mutant,” TTM) is detected, cocktail ADX2, as well as the individual member phages of the cocktail were tested against different bacterial strains mixtures (termed multi-culture (MC)). 10 bacterial colonies of each bacterial strain tested were picked (˜full 1 μL loop) and transferred into a culture tube prefilled with 4 mL of liquid BHIS and cultured to OD600≥1.5 by shaking, 180 rpm, at 37° C. for ˜16 h. The bacterial culture was diluted using BHIS supplemented with 1 mM MMC ions to reach a final OD of 0.05 and dispensed into a 96-well plate. Each phage was diluted to a concentration of 10 8 PFU/ml, and to create the cocktail, equal ratios were mixed to get the same total concentration as the individuals. Then, 10 μL of the sample of single or cocktail phages were added to the wells to a final concentration of 10 6 PFU in each well. For NPC, (no phages control), BHIS was added to the appropriate wells. Mineral oil was added to each well to reduce evaporation of the samples, and the plate was covered with sterile film to allow bacteria growth and keep the culture sterile. Plates were incubated for 18-45 hours in a plate reader at 32° C. with shaking, and OD600 was measured every 20 minutes. Two biological repeats were performed for the assay, and BHIS media supplemented with 1 mM MMC ions served as a blank.

[0419] FIGS. 5A to 5B present the effect of ADX2 cocktail compared to each member phage with respect to a mixture of equal concentration of three bacterial strains, prepared as described above. The ability of ADX2 to eliminate any bacterial resistant mutants' growth for prolong time is demonstrated at least till approximately 19 hours (FIG. 5A) and 55 Hours (FIG. 5B). FIGS. 5A to 5B demonstrates the ability of a synergistic performing phage mixture to eliminate resistant mutant growth in comparison each phage member separately.

[0420] Table 5 presents, for each graph in FIGS. 5A to 5B, the approximate time (in hours) when the corresponding OD600 reading reaches the value 0.3, indicative of mutant bacterial growth. The table also presents the OD600 normalized area under the curve (AUC), i.e., the ratio between the AUC600 of the line representing treatment with the phage/phages cocktail, and the AUC600 of the line representing OD600 readings of the no phage control (NPC):

$$normalized area under the curve = \frac{Phage treatment area under the curve}{N P C area under the curve}$$

TABLE 5

| | | | Normalized area |
|---|---|---|---|
| | | Approx. | under the curve |
| | | Time (hours) | [Time point when |
| | | when OD600 | it was computed |
| FIG. | sample | reaches 0.3 | (hours)] |
| 5A | MC (NPC) | 1.5 | 1 |
| 5A | MC + | 11 | 0.346 [18 Hrs] |
| | STA48-1 | | |
| 5A | MC + | 11.5 | 0.332 [18 Hrs] |
| | STA48-5 | | |
| 5A | MC + | 4.7 | 0.521 [18 Hrs] |
| | STA48-7 | | |
| 5A | MC + | No mutant's growth | 0.146 [18 Hrs] |
| | Cocktail | (never reaches OD of | |
| | | 0.3, max OD = 0.029) | |
| 5B | MC (NPC) | 5.6 | 1 |
| 5B | MC + | 13.5 | 0.453 [55 Hrs]; |
| | STA48-1 | | 0.363 [18 Hrs] |
| 5B | MC + | 17.2 | 0.73 [55 Hrs]; |
| | STA48-5 | | 0.146 [18 Hrs] |
| 5B | MC + | 17.6 | 0.535 [55 Hrs]; |
| | STA48-7 | | 0.178 [18 Hrs] |
| 5B | MC + | No mutant's growth | 0.022 [55 Hrs]; |
| | Cocktail | (never reaches OD 0.3, | 0.046 [18 Hrs] |
| | | max OD = 0.0526) | |

### Example 6 Tested Phages are Effective Against SA Bacteria from AD Patients

### Materials and Methods

S. aureus Isolation from AD Patients

[0421] Patients with atopic dermatitis were recruited from Israel and the USA to participate in a sampling study in which skin samples were collected from lesional skin. Skin samples were collected from 1 to 4 areas of lesional skin and plated on ChromAgar plates for selective growth of Staphylococcus species. S. aureus was distinguished based on the morphology of the colonies and further identified as S. aureus using Maldi-Tof.

### EOP Assay

[0422] 2-3 bacterial colonies of each strain to be tested were picked and transferred into the same culture tube prefilled with 4 mL of liquid BHIS and cultured to OD600 ≥1.5 by shaking, 180 rpm, at 37° C. for overnight. One culture tube with 4 mL of BHIS only was used as blank.

[0423] 380 μl of the bacterial culture was transferred into a tube containing 10-12 mL of top-agar (preheated in a thermo-block at 65° C. for at least 30 min). Then, 1 mM final concentration of MMC ions were added, and the tube was mixed gently. The tube contents were poured onto a 12×12 cm BHIS agar plate at RT. The top-agar was allowed to solidify for 15 min at RT. Phage sample was 10-fold serially diluted by pipetting 20 μL of the highest concentration into 180 μL of BHIS. Using a clip-tip, 5 μL of the phage dilutions 100-10-7 were spotted onto the bacterial lawn (prepared in step 3). After 15 min at RT, the plates were placed at 30° C. until visible plaques appeared (˜18 hours).

[0424] Phage titer was calculated as follows: (a) The number of plaques at the appropriate dilution (where single plaques can be counted) was multiplied by 200 (1000/5 μL) and by the dilution factor and presented as PFU/mL. (b) EOP was calculated by dividing the PFU/mL obtained on each tested STA strain to the one obtained on the production host according to the following formula:

$$EOP = \frac{\frac{PFU}{mL} tested strain}{\frac{PFU}{mL} production host}$$

[0425] Bacterial strains on which the EOP was ≥0.1 for the tested phage were considered sensitive.

### Results and Discussion

TABLE 6

| | | | | Clonal | | Deposit |
|---|---|---|---|---|---|---|
| | STA48-1 | STA48-5 | STA48-7 | complex | MLST | number |
| STA163 | S | S | S | CC8 | ST8 | B/00393 |
| STA174 | S | S | S | CC8 | ST8 | B/00394 |
| STA210 | S | S | S | CC12 | ST12 | B/00395 |
| STA236 | R | R | S | CC398 | ST291 | B/00397 |
| STA238 | S | S | R | CC1 | ST2990 | B/00398 |

[0426] Specifically, Strain STA163 was deposited on May 10, 2022, at the Polish Collection of micororganisms PCM), Institute of Immunology and Experimental Therapy, Polish Academy of Sciences, Ul. Weigla 12, 53-114 Wroclaw, Poland, with accession number B/00393.

[0427] Strain STA174 was deposited on May 10, 2022, at the Polish Collection of micororganisms PCM), Institute of Immunology and Experimental Therapy, Polish Academy of Sciences, Ul. Weigla 12, 53-114 Wroclaw, Poland, with accession number B/00394.

[0428] Strain STA210 was deposited on May 10, 2022, at the Polish Collection of micororganisms PCM), Institute of Immunology and Experimental Therapy, Polish Academy of Sciences, Ul. Weigla 12, 53-114 Wroclaw, Poland, with accession number B/00395.

[0429] Strain STA236 was deposited on May 10, 2022, at the Polish Collection of micororganisms PCM), Institute of Immunology and Experimental Therapy, Polish Academy of Sciences, Ul. Weigla 12, 53-114 Wroclaw, Poland, with accession number B/00397.

[0430] Strain STA238 was deposited on May 10, 2022, at the Polish Collection of micororganisms PCM), Institute of Immunology and Experimental Therapy, Polish Academy of Sciences, Ul. Weigla 12, 53-114 Wroclaw, Poland, with accession number B/00398.

[0431] In this study, isolates of S. aureus from seven patients with AD were tested against phages STA48-1, STA48-5, and STA48-7 (members of ADX2 cocktail). Patients were found to have a single SA strain, across all their lesions, and typically more than one lesion contained the single S. aureus. Table 6 details each phage's sensitive strains. In four out of the seven tested patients (57%), the SA bacteria were sensitive to each tested phage, individualy. In five out of the seven tested patients (71%), the SA bacteria were sensitive to at least one phage of this ADX2 cocktail.

### Example 7 Essential Genes for the Phage Lytic Cycle

### Materials and Methods

### Gene Analysis

[0432] According to certain embodiments, the phages' genomes are reduced in order to create synthetic phages with smaller genomes without a significant hamper of their essential functionality (e.g., the ability to infect and lyse a host bacteria). According to certain embodiments, such a reduced genome can then more readily accommodate a heterogenous molecule of DNA that otherwise, if added to the original full genomic DNA may be challenging due to the limited DNA encapsulation capacity of a phage (see for example Pires, D. P., Monteiro, R., Mil-Homens, D. et al. Designing P. aeruginosa synthetic phages with reduced genomes. Sci Rep 11, 2164 (2021). doi(dot)org/10.1038/s41598-021-81580-2). Additionally, or alternatively, the genetic sequences of the selected phages can be modified or optimized, e.g., for expression in a suitable producer cell line, provided the essential genes are relatively conserved.

[0433] According to certain embodiments, the following exemplary method for finding the likely essential genes was used. A gene X was defined as essential if it was recognized and assigned a function by PATRIC (docs(dot)patricbrc(dot)org/). In addition, if the gene's function was unknown by PATRIC (e.g. “hypothetical protein” or “phage protein”) the following test was performed: given a phage genome, for a gene X, count the number of homologs (global amino acid similarity of 30% or more using blastp) in all publicly available phage genomes infecting the same species (num.homologs (gene X)). Subsequently, the mean and standard deviation of number of homologs for each gene in the genomes that were found to contain gene X were computed, and the z-score for gene X was calculated as follows:

$$z ( gene X ) = \frac{\begin{matrix}\begin{matrix}[ num . homologs ( gene X ) ] - \\ [ mean num . homologs ( each gene in each\end{matrix} \\ genome containing gene X ) ]\end{matrix}}{\begin{matrix}standard deviation num . homologs ( each gene \\ in each genome containing gene X )\end{matrix}}$$

[0434] Genes with z-scores over-1 were defined essential. All other genes were defined non-essential.

[0435] Below, is a list of essential genes for each phage. Each gene is represented by square brackets, containing the following data fields separated by semi-columns: first, the gene's start coordinate, end coordinate, and strand to relate to with relation to the phage genome sequence as presented in the sequence listing (+ is the strand given in the sequence listing). Second, the gene's function. (“HP” denotes a hypothetical protein and “PP” denotes an unclassified phage protein).

### Essential Genes of Phage STA48-1:

[0436] [670:1150:-; HP] [1302:1935:-; HP] [2118:2898:-; HP] [2994:3936:-; HP] [4200:4908:-;HP] [4962:5160;-; HP] [5885:6083:-; HP] [6099:6489:-; HP] [6509:6791:-; HP] [6768:7035:-;HP] [8063:8270:+;HP] [8280:8496:+;HP] [8774:9638:+;HP] [9735:9951:+;HP] [10754:109 43: +;HP] [11023:11524:+;HP] [11523:12441:+;HP] [12466:13213:+;HP] [13314:13536:+; HP] [13549:13765:+;HP] [13757:14396:+;HP] [14409:14598:+;HP] [14590:14863:+;HP] [1 5027:15291:+;HP] [15403:15907:+;HP] [16639:17383:+;HP] [17384:18014:+;HP] [18006:18630: +;HP] [18604:18778:+;HP] [18791:19055:+;HP] [19133:21173:+;HP] [21172:21334: +;HP] [21333:21519:+;HP] [21637:22054:+;HP] [22040:22364:+;HP] [22360:22501:+;HP ] [22569:26376:+;HP] [26394:26757:+;HP] [27143:27929:+;HP] [27921:28146:+;HP] [2823 5:28559:+;HP] [28575:29136:+;HP] [29262:29802:+;HP] [29804:30212:+;HP] [30208:304 03: +;HP] [30402:30789:+;HP] [30785:31139:+;HP] [31135:31375:+;HP] [31388:31955:+; HP] [32593:32938:-; HP] [33042:33267:-; HP] [33280:33622:-; HP] [33868:34015:-;HP] [34865:35180:-; HP] [35749:36157:-; HP] [36966:37248:-; HP] [39343:39745:-;HP] [41421:41661:-; HP] [41726:41912:-; HP] [42144:42354:-; HP] [42479:42881:-;HP] [45155:45329:-; HP] [45802:46489:-; HP] [46880:47078:-; HP] [48624:48837:-;HP] [48868:49588:-; HP] [49587:49794:-; HP] [49799:50351:-; HP] [50369:51026:-;HP] [51048:51567:-; HP] [51701:51947:-; HP] [51949:52264:-; HP] [52339:52621:-;HP] [52633:52918:-; HP] [52918:53182:-; HP] [53191:53443:-; HP] [53583:53982:-;HP] [54017:54653:-; HP] [54663:55101:-; HP] [55165:55624:-; HP] [55641:56373:-;HP] [56745:57600:-; HP] [57599:58106:-; HP] [58086:58848:-; HP] [58840:59131:-;HP] [59787:61041:-; HP] [61033:61804:-; HP] [61803:62058:-; HP] [62154:62367:-;HP] [62917:63550:-; HP] [63656:64316:-; HP] [64302:64656:-; HP] [64648:65575:-;HP] [65722:66691:-; HP] [67019:67244:-; HP] [67306:68464:-; HP] [68534:69017:-;HP] [69041:69698:-; HP] [70661:73187:-; HP] [73575:74178:-; HP] [74384:74705:-;HP] [74688:75015:-; HP] [75027:75450:-; Ribonucleoside-diphosphate reductase large subunit] [75663:76380:-; HP] [79732:80851:-; HP] [81682:82120:-; HP] [82488:83565:-;HP] [83578:84172:-; HP] [84155:85634:-; HP] [85810:87094:-; HP] [87568:88012:-;HP] [88272:89304:-; HP] [89373:90063:-; HP] [90279:90999:-; HP] [91323:91581:-;HP] [91580:93020:-; HP] [93012:94236:-; HP] [94608:95730:-; HP] [96148:96604:-;HP] [96691:98056:-; HP] [98061:98418:-; HP] [98435:100349:-; HP] [100338:100509:-;HP] [100560:104019:-; HP] [104038:104560;-; Virion protein 3] [104663:107366:-;HP] [107376:108423:-; HP] [108437:109142:-; HP] [109141:109663:-;HP] [109662:110514:-; HP] [110625:113082:-; HP] [113072:113966:-;HP] [113971:116404:-; HP] [116455:117286:-; HP] [117344:118214:-;HP] [118669:121657:-; HP] [121716:122175:-; HP] [122266:122695:-;HP] [122783:123092:-; HP] [123148:123529:-; HP] [125992:126352:-; Virion protein 5] [126414:128175:-; Putative tail sheath protein] [128197:128404:-; HP] [128403:129240:-;HP] [129258:129879:-; HP] [129878:130754:-; HP] [131045:132254:- ;HP] [132695:133445:-; HP] [133791:135183:-; Major capsid protein] [136231:136996:-;HP] [137172:137877:-; HP] [138501:139458:-; HP] [139498:139741:-;HP] [139869:140163:-; HP].

### Essential Genes of Phage STA48-2:

[0437] [186:369:+;HP] [361:664:+;HP] [681:918:+;HP] [941:1310:+;HP] [1358:1535:+;HP] [1538:1709: +;HP] [1711:2194:+;HP] [2241:3489:+;HP] [3503:5789:+;HP] [5902:7342:-;HP] [7316:7739:-; HP] [7740:9504:-; HP] [9559:10012:-; HP] [10029:11046:-;HP] [11108:11870:-; HP] [11876:13814:-; HP] [13826:14603:-; HP] [14574:15558:-;HP] [15572:16784:-; Major capsid protein] [16790:16973:-; HP] [16986:17364;-; HP]

### Essential Genes of Phage STA48-3:

[0438] [300:396:+;HP] [416:719:+;HP] [736:973:+;HP] [996:1365:+;HP] [1413:1590:+;HP] [1591:1858: +;HP] [2023:2506:+;HP] [2553:3801:+;HP] [3815:6101:+;HP] [6215:7655:-;HP] [7629:8052:-; HP] [8053:9817:-; HP] [9871:9997:-; HP] [10185:11238:-;HP] [11234:11375:-; HP] [11437:12190:-; HP] [12201:14145:-; HP] [14158:14935:-;HP] [14906:15890:-; HP] [15904:17119:-; Major capsid protein] [17125:17308:-;HP] [17321:17741:-; HP]

### Essential Genes of Phage STA48-4:

[0439] [313:409:+;HP] [429:732:+;HP] [749:986:+;HP] [1009:1378:+;HP] [1426:1603:+;HP] [1604:1871: +;HP] [2036:2519:+;HP] [2566:3814:+;HP] [3828:6114:+;HP] [6228:7668:-;HP] [7642:8065:-; HP] [8066:9830:-; HP] [9884:10337:-; HP] [10586:11330:-;HP] [11392:12145:-; HP] [12156:14100:-; HP] [14113:14890:-; HP] [14861:15845:-;HP] [15859:17074:-; Major capsid protein] [17080:17263:-; HP] [17276:17696:-; HP]

### Essential Genes of Phage STA48-5:

[0440] [11:320:+;HP] [408:837:+;HP] [928:1387:+;HP] [1446:4434:+;HP] [4888:5758:+;HP] [5816:6641: +;HP] [6692:8891:+;HP] [9367:10573:+;HP] [11013:11907:+;HP] [11897:14354:+;H P] [14465:15317:+;HP] [15316:15838:+;HP] [15837:16542:+;HP| 16556:17603:+;HP] [17 613:20316:+;HP] [20419:20941:+; Virion protein 3] [20960:24419:+;HP] [24470:24641:+;HP] [24630:26544:+;HP] [26559:26916:+;HP] [269 21:28286:+;HP] [28371:28827:+;HP] [29245:30367:+;HP] [30739:31963:+;HP] [31955:33 395: +;HP] [33394:33652:+;HP] [33976:34300:+;HP] [34495:34696:+;HP] [34664:34913:+; HP] [34912:35602:+;HP] [35671:36703:+;HP] [36963:38898:+;Exonuclease subunit 2] [38881:39475:+;HP] [39488:40565:+;HP] [40933:41371:+;HP] [42202:43321:+;HP] [433 36:45070:+;HP] [45900:46827:+;HP] [46839:47166:+;HP] [47149:47470:+;HP] [47676:48 279: +;HP] [48883:49159:+;HP] [49381:52594:+;HP] [52618:53101:+;HP] [53171:54347:+; HP] [54409:54634:+; HP] [54962:55931:+; HP] [56078:57005:+;HP] [56997:57351:+;HP] [5 7337:57997:+; HP] [58103:58736:+;HP] [59286:59499:+; HP] [59595:59850:+;HP] [59849:60620: +;HP] [60612:61866:+;HP] [62522:62813:+;HP] [62805:63567:+;HP] [63547:64054: +;HP] [64053:64908:+;HP] [65280:66012:+;HP] [66029:66488:+;HP] [66552:66990:+;HP ] [67000:67636:+;HP] [67671:68070:+;HP] [68210:68462:+;HP] [68471:68735:+;HP] [6873 5:69020:+;HP] [69032:69326:+;HP] [69389:69704:+;HP] [69706:69952:+;HP] [70086:705 90: +;HP] [70618:71275:+;HP] [71293:71845:+;HP] [71850:72057:+;HP] [72056:72776:+; HP] [72807:73020:+;HP] [73013:73910:+;HP] [74015:74213:+;HP] [74212:74605:+;HP] [7 4604:75081:+;HP] [75141:75336:+;HP] [75848:76883:+;HP] [77884:78292:+;HP] [78417:78627: +;HP] [78859:79045:+;HP] [79110:79338:+;HP] [79800:80151:+;HP] [80290:80629: +;HP] [81087:81489:+;HP] [81514:81874:+;HP] [83149:83458:+;HP] [83567:84191:+;HP] [84317:84599:+;HP] [87375:87690:+;HP] [87761:87998:+;HP] [88074:88365:+;HP] [8838 0:88527:+;HP] [88770:89112:+;HP] [89125:89338:+;HP] [89445:89790:+;HP] [90344:909 11:-; HP] [90924:91164:-; HP] [91160:91514:-; HP] [91510:91897:-; HP] [91896:92088:-;HP] [92087:92495:-; HP] [92497:93016:-; HP] [93142:93703:-; HP] [93719:94043:-;HP] [94132:94357:-; HP] [94349:95135:-; HP] [95521:95884:-; HP] [95902:99709:-;HP] [99777:99918:-; HP] [99914:100238:-; HP] [100224:100641:-; HP] [100759:100945:-;HP] [100944:101106:-; HP] [101105:103145:-; HP] [103223:103487:-;HP] [103500:103674:-; HP] [103648:104272:-; HP] [104264:104894:-;HP] [104895:105639:-; HP] [106371:106875:-; HP] [106987:107251:-;HP] [107415:107688:-; HP] [107680:107869:-; HP] [107882:108521:-;HP] [108513: 108729:-; HP] [108742: 108964:-; HP] [109065: 109635:-;HP] [109830:110259:-; HP] [110728:111646:-; HP] [111645:112146:- ;HP] [112226:112415:-; HP] [113218:113434:-; HP] [113531:113765:-;HP] [113769:113994:-; HP] [114272:114488:-; HP] [114498:114705:-;HP] [115733:116000:+;HP] [115977:116259:+;HP] [116279:116669:+;HP] [116685:11688 3: +;HP] [117608:117806:+;HP] [117860:118568:+;HP] [118832:119774:+;HP] [119870:12 0650: +;HP] [120833:121466:+;HP] [121618:122098:+;HP] [123154:123448:+; HP] [12357 6:123819:+;HP] [123859:124816:+;HP] [125349:126054:+;HP] [126230:126995:+;HP] [12 8043:129435:+; Major capsid protein] [129781:130531:+;HP] [130715:130835:+;HP]: 132027:+;HP] [132026:132647:+;HP] [132665:133502:+;HP] [133501:133708:+; HP] [133730:135491:+;Putative tail sheath protein] [135553:135892:+; Virion protein 5] [137040:137178:+; HP] [137283:137664:+;HP]

### Essential Genes of Phage STA48-6:

[0441] [842:1250:+;HP] [1375:1585:+;HP] [1817:2003:+;HP] [2068:2296:+;HP] [2758:3109:+;HP] [4649:4859:+;HP] [4861:5170:+;HP] [5279:5903:+; HP] [6029:6311:+;HP] [9087:9402:+; HP] [9473:9710:+;HP] [9786:10077:+;HP] [10092:10239:+; HP] [10482:10824:+;HP] [1083 7:11050:+;HP] [11157:11502:+;HP] [11791:12166:-; HP] [12454:13015:-;HP][13031:13355:-; HP] [13444:13669:-; HP] [13661:14447:-; HP] [14836:15199:-;HP] [15217:19024:-; HP] [19091:19232:-; HP] [19228:19552:-; HP] [19538:19955:-;HP] [20073:20259:-; HP] [20258:20420:-; HP] [20419:22459:-; HP] [22537:22801:-;HP] [22814:22988:-; HP] [22962:23586:-; HP] [23578:24208:-; HP] [24209:26009:-;HP] [27704:27968:-; HP] [28407:28596:-; HP] [28609:29248:-; HP] [29240:29456:-;HP] [29469:29691:-; HP] [29792:30362:-; HP] [30557:30986:-; HP] [31455:32373:-;HP] [32372:32873:-; HP] [32952:33141:-; HP] [33943:34159:-; HP] [34256:34490:-;HP] [34494:34719:-; HP] [34999:35215:-; HP] [35225:35432:-;HP] [36460:36727:+;HP] [36704:36986:+;HP] [37006:37396:+;HP] [37412:37610:+;HP] [38335:38533:+; HP] [38587:39295:+;HP] [39560:40499:+;HP] [40595:41375:+;HP] [41558:42191: +;HP] [42343:42823:+;HP] [43825:44119:+;HP] [44247:44490:+;HP] [44530:4548 7: +;HP] [46020:46725:+;HP] [46901:47666:+; HP] [48674:50066:+; Major capsid protein] [50412:51162:+;HP] [51346:51466:+;HP] [51782:52658:+;HP] [52657:53278:+;H P] [53296:54133:+;HP] [54132:54339:+;HP] [54361:56122:+;Putative tail sheath protein] [56184:56523:+; Virion protein 5] [57671:57809:+; HP] [57914:58295:+;HP]: 58660:+;HP] [58748:59177:+;HP] [59268:59727:+;HP] [59786:62774:+;HP] [6322 8:64098:+;HP] [64156:64981:+;HP] [65032:67465:+;HP] [67470:68364:+;HP] [68354:708 11: +;HP] [70922:71774:+;HP] [71773:72295:+;HP] [72294:72999:+;HP] [73013:74060:+; HP] [74070:76773:+;HP] [76876:77398:+; Virion protein 3] [77417:80876:+;HP] [80927:81098:+; HP] [81087:83001:+;HP] [83016:83373:+;HP] [83378:84743:+;HP] [8482 8:85284:+;HP] [85702:86824:+;HP] [87196:88420:+;HP] [88412:89852:+;HP] [89851:901 09: +;HP] [90433:90757:+;HP] [90952:91153:+;HP] [91121:91370:+;HP] [91369:92059:+; HP] [92128:93160:+;HP] [93420:95355:+; Exonuclease subunit 2] [95338:95932:+;HP] [95945:97022:+; HP] [97390:97828:+;HP] [98659:99778:+;HP] [99793:101527:+;HP] [102 357:103284:+;HP] [103296:103623:+;HP] [103606:103927:+;HP] [104133:104736:+;HP] [105340:105616:+; HP] [105838:109051:+;HP] [109075:109558:+;HP] [109628:110804:+; HP] [110866:112102:+;HP] [112094:112448:+;HP] [112434:113094:+;HP] [113200:11383 3: +;HP] [114383:114596:+;HP] [114692:114947:+;HP] [114946:115717:+;HP] [115709:11 6963: +;HP] [117619:117910:+;HP] [117902:118664:+;HP] [118644:119151:+;HP] [11915 0:120005:+;HP] [120377:121109:+;HP] [121126:121585:+;HP] [121649:122087:+;HP] [12 2097:122733:+;HP] [122768:123167:+;HP] [123307:123559:+;HP] [123568:123832:+;HP] [123832:124117: +;HP] [124129:124423:+;HP] [124486:124801:+;HP] [124803:125049:+; HP] [125183:125687:+;HP] [125715:126372:+;HP] [126390:126942:+;HP] [126947:12715 4: +;HP] [127153:127873:+;HP] [127904:128117:+;HP] [128110:129007:+;HP] [129112:12 9310: +;HP] [129309:129702:+;HP] [129701:130433:+;HP] [130906:131941:+;HP]

### Essential Genes of Phage STA48-7:

[0442] [125:344:+;HP] [1889:2075:+;HP] [2159:2663:+;HP] [2662:4150:+;HP] [4263:4572:+;HP] [4571:5366:+; HP] [5562:6255:+;HP] [6363:6591:+;HP] [6593:6824:+;HP] [6813:7455:+;HP] [7477:7669:+;HP] [7658:7823:+;HP] [8099:8714:+;HP] [8765:9506:+;HP] [9574:9799:+; HP] [9798:10695:+;HP] [10687:11314:+;HP] [11306:11885:+;HP] [12081:12345:+;HP] [12 422:14471:+;HP] [14470:14632:+;HP] [14675:14864:+; HP] [14863:15178:+;HP] [15158:1 5779: +;HP] [15910:16327:+;HP] [16430:16646:+;HP] [16797:17916:+;HP] [17927:18773: +;HP] [19053:19218:+;HP] [19220:19754:+; HP] [19753:20296:+; HP] [20345:20828:+;HP] [20868:21042:+; HP] [21140:21530:+;HP] [21531:21771:+;HP] [21782:21887:+;HP] [2194 9:22687:+;HP] [22676:22871:+;HP] [22871:23090:+;HP] [24541:26392:+;HP] [26484:271 92: +;HP] [27188:27587:+;HP] [27900:28389:+;HP] [28400:28943:+;HP] [28956:29388:+; HP] [29380:29866:+;HP] [29862:30054:+;HP] [30056:30491:+;HP] [30490:30727:+;HP] [3 1059:31239:-; HP] [31323:31593:-; HP] [31592:31766:-; HP] [32474:32711:-;HP] [34120:34501:-; HP] [34600:34924:-; HP] [35091:35250:-;HP] [35850:36339:+;HP] [37162:37450:-; HP] [37655:37964:-;HP] [38273:38612:+;HP] [38816:39164:-; HP] [39174:39414:-; HP] [39509:39767:-;HP] [39770:40064:-; HP] [40171:40357:-; HP] [40372:40672:-; HP] [42707:42902:-;HP] [43909:44206:-; HP] [44270:44468:-; HP] [44469:44862:-; HP] [44878:45124:-;HP] [45202:46672:-; HP] [46689:47598:-; HP] [47594:47903:-; HP] [47996:48260:-;HP] [48287:48488:-; HP] [48500:48725:-; HP] [49195:49510:-; HP] [49876:50194:-;HP] [50196:50460:-; HP] [50474:50654:-; HP] [51237:51765:-; HP] [52406:52712:-;HP] [52788:53052:-; HP] [53168:53456:-; HP] [53472:53766:-; HP] [53767:54169:-;HP] [54395:54575:-; HP] [55682:56033:-; HP] [56047:56353:-; HP] [56422:56701:-;HP] [56700:57048:-; HP] [57060:57429:-; HP] [57441:57624:-; HP] [57671:57968:-;HP] [57960:58137:-; HP] [58148:58397:-; HP] [58411:59056:-; HP] [59136:59370:-;HP] [59362:59614:-; HP] [59603:59780:-; HP] [59815:60373:-; HP] [60377:60620:-;HP] [60766:61165:-; HP] [61226:61931:-; HP] [61947:62391:-; HP] [62455:62914:-;HP] [62931:63663:-; HP] [64034:64898:-; HP] [64897:65344:-; HP] [65321:66089:-;HP] [66081:66618:-; HP] [66681:66993:-; HP] [66979:67348:-; HP] [67361:68612:-;HP] [68604:69360:-; HP] [69363:69624:-; HP] [69718:69946:-; HP] [69960:70482:-;HP] [70495:71128:-; HP] [71254:71917:-; HP] [71903:72257:-; HP] [72260:73529:-;HP] [74946:75429:-; HP] [75757:78976:-; HP] [79052:79358:-; HP] [79367:79964:-;HP] [80170:80491:-; HP] [80474:80804:-; HP] [80821:81871:-; Ribonucleoside-diphosphate reductase subunit beta] [81884:83999:-; Ribonucleoside-diphosphate reductase large subunit] [84013:84406:-; HP] [84422:85031:-; HP] [85017:85470:-; HP] [85872:86940:-;HP] [86954:87551:-; HP] [87550:89470:-; Exonuclease subunit 2] [89469:89847:-;HP] [89846:90872:-; HP] [90950:92393:-; HP] [92385:93999:-; HP] [94010:95759:-;HP] [95849:97226:-; HP] [97232:97604:-; HP] [97625:99548:-; HP] [99548:99707:-;HP] [99755:103214:-; HP] [103234:103756:-; Virion protein 3] [103866:106821:-;HP] [106946:107993:-; HP] [108007:108712:- ; HP] [108711:109236:-;HP] [109235:110027:-; HP] [110133:112680:-; HP] [112679:113567:-;HP] [113580:116007:-; HP] [116085:120141:-; HP] [120196:120733:-;HP] [120776:121235:-; HP] [121367:121679:-; HP| 122121:122580:-;HP] [123281:124217:-; HP] [124887:125268:-; Virion protein 5] [125340:127104:-; Putative tail sheath protein] [127130:127346:-; HP] [127347:128184:-; HP] [128202:128823:-;HP] [128822:129701:-; HP] [129714:130623:-; HP] [131044:132436:-; Major capsid protein] [132551:133508:-; HP] [133526:134267:-; HP] [134494:135997:-;HP] [136189:136501:-; HP] [137004:138156:-; HP] [138249:138729:-;HP] [138885:139707:-; HP] [139699:141517:-; HP] [141531:141858:-;HP] [141938:142217:-; HP] [142194:142461:-; HP] [143485:143692:+;HP] [143704:143914: +;HP]

### Example 8 Tested Phages are Effective in all Tested Growth States

[0443] In this study a liquid assay was used to assess phage infection of bacteria in different growth phases, focusing on stationery state bacteria, which can serve as a proxy for inactive metabolic bacteria (Conlon et al., 2016; Lewis, 2007). Different growth phases represent diverse metabolic states of the bacteria and can thus be used to assess phage infectivity under different metabolic conditions.

[0444] A liquid infection assay was conducted on representatives S. aureus strains, to evaluate the activity of ADX2 (phages STA48-1, STA48-5, STA48-7) on early-log, mid-log, and stationary state bacteria.

Methods—Liquid infection and OD readings

[0445] 10 bacterial colonies of each tested strain were picked (˜full 1 μL loop) and transferred into the same culture tube prefilled with 4 mL of liquid BHIS and cultured to OD600 ≥1.5 by shaking, 180 rpm, at 37° C. for ˜6 h. One culture tube with 4 mL of BHIS only was used as blank. 40 μL of culture was diluted into two culture tubes prefilled with 4 mL of liquid BHIS and incubated by shaking, 180 rpm, at 37° C. until OD600 reached 0.1-0.2 for an early-log phase and 0.6-0.8 for a mid-log phase. The rest of the bacterial culture was incubated by shaking, 180 rpm, at 37° C. for an additional ˜24 h for a stationary growth phase. 96well plates were prepared containing 190 μL of bacterial culture from each bacterial growth phase (early-log, mid-log, and stationery) supplemented with 1 mM (MMC) ions in duplicate of each STA strain. 10 μL the following mixtures was added to the appropriate wells:
[0446] a. No phage control (NPC): BHIS alone
[0447] b. Phage cocktail in BHIS at 106 PFU/well

[0448] The plate also contained duplicate wells of 200 μL BHIS media alone and phage cocktail in BHIS alone to rule out contamination within the media or within the phage cocktail as controls. 50 μL mineral oil was added to each well to prevent evaporation, and the plates were sealed with breathable film. The plates were then placed in a Freedom Evo robotic liquid handler (Tecan) attached to an Infinite M200PRO plate reader (Tecan), heated to 32° C., and gently rotating at 90 rpm. The OD600 of each well was read every ˜20 Min. over 100 hours.

### Results

[0449] ADX2 phage cocktail is infective in all tested growth states for the strains which were deemed sensitive in a preliminary liquid host range assessment. FIG. 6 presents growth curves of two bacterial strains with different sensitivity patterns (A) SA strain 527 (upper three charts) is sensitive to all three phages. (B) SA strain 418 (lower three charts) is sensitive only to STA48-7. Leftmost two charts present the OD curves for infection at early-log phase, middle two charts present the OD curves for infection at mid-log phase, and rightmost two charts present the OD curves for infection at stationary phase. NPC; no phage control.

### Example 9 Detection and Inactivation of Transposable Elements

[0450] A transposable element (TE, transposon, or jumping gene) is a DNA sequence that can change its position within the phage genome, and may be a source of genetic alternations and instability, e.g., by creating or reversing mutations and altering the phage's genetic identity and genome size. Such instability may alter the phage's performance (e.g. with respect to the original host range). Therefore, it is favorable to detect and inactivate TEs.

[0451] Using computational methodology, the genomes of the phages of the present invention were screened, and the following transposons were detected:

TABLE 7

| Phage | IS family | Start (bp)* | End (bp)* |
|---|---|---|---|
| STA48-1 | IS607 | 635 | 2167 |
| STA48-1 | IS607 | 96039 | 97412 |
| STA48-5 | IS607 | 9273 | 10728 |
| STA48-5 | IS200/IS605 | 48763 | 49159 |
| STA48-6 | IS200/IS605 | 105220 | 105616 |

*With relation to the phage's genomic sequence as detailed in the sequence listing.

[0452] According to certain embodiments, TEs, such as the ones listed in table 7 are inactivated by complete excision or partial excision of DNA base pairs. For example, the shortest excision of a single base pair may lead to a frame shift in the Transposase enzyme gene (TPase), and/or to impair the function of a structural sequence required for transposon mobility (e.g., insertion and/or excision).

[0453] Alternatively, or in addition, the TE may be inactivated by replacement of an original single base pair or more. For example, a change that causes a codon shift, or introduces an early stop codon to the TPase gene, may lead to an inactive version of the translated protein. One of skill in the art can readily envision numerous alternative molecular biology methods known in the art to implement such genetic manipulations, in order to inactivate transposons.

### Example 10 Testing the Phage Efficacy Using In Vivo, and Ex Vivo Models of Skin Infection with Staphylococcus aureus

[0454] Different models are used to assess phage efficacy in relevant conditions that mimic the human skin. For example, Reconstructed Human Epidermis RHE model may be used for this purpose. It is an in vitro model reconstructed from normal human keratinocytes cultured on an inert polycarbonate filter. This model may be used to test and confirm the phages' efficacy by measuring if the bacterial burden is reduced upon phage treatment. The model may be constructed with different S. aureus strains, allowing one to study the effect of the phages on different phenotypes such as reduction or prevention of biofilm, and efficacy against slow growers. Such studies can be conducted to compare the efficacy of different phages, different formulations, and varying application regimens.

[0455] Another model is a mouse model which enables studying phage efficacy in a live organism in the presence of an immune system and potential pathways that may interfere with phage activity. Such a model was used by Nakatsuji et al. (Nature Medicine, 2021) to study reduction of S. aureus on mouse skin that was treated to model atopic dermatitis. Specifically, analysis was conducted on mouse skin after twice-daily topical applications of ShA9 (an antimicrobial agent) or vehicle for 3 days on OVA-sensitized FLGft/ft Balb/c mice that were colonized by S. aureus for 4 days. In this study they monitored live S. aureus recovered from lesional back skin by swab, inflammation, and relative abundance of mRNA of selected cytokines.

### Example 11 Testing the Phage Infectivity Against Staphylococcus epidermidis

[0456] Staphylococcus epidermidis (S. epidermidis) is a species of Staphylococcus bacteria that is found in the natural microbiome of human skin. Previous research suggests a potential dual role of S. epidermidis as both non harmful colonizer and pathogen.

[0457] To explore the infectivity of phages STA48-1, STA48-5, and STA48-7 (members of ADX2 cocktail) against S. epidermidis, 13 representative strains of S. epidermidis, isolated from human skin, were obtained from IMHA bacterial repository and assessed by EOP analysis. Table 8 below presents a list of the 13 strains of S. epidermidis and the corresponding sensitivity to phage STA48-7 at an EOP of ≥0.1. Two strains of S. epidermidis were found sensitive to STA48-7. All 13 strains of S. epidermidis were found to be resistant to STA48-1 and STA48-5 at that EOP level.

TABLE 8

| S. epidermidis strain | STA48-7 |
|---|---|
| IHMA-2213126 | R |
| IHMA-2161065 | R |
| IHMA-2213888 | R |
| IHMA-2312721 | R |
| IHMA-2271570 | R |
| IHMA-2243094 | R |
| IHMA-2249124 | R |
| IHMA-2164773 | R |
| IHMA-2188943 | R |
| IHMA-2267582 | S |
| IHMA-2240559 | S |
| IHMA-2283726 | R |
| IHMA-2160469 | R |

[0458] Although the invention has been described in conjunction with specific embodiments thereof, it is evident that many alternatives, modifications, and variations will be apparent to those skilled in the art. Accordingly, it is intended to embrace all such alternatives, modifications and variations that fall within the spirit and broad scope of the appended claims.

[0459] It is the intent of the applicant(s) that all publications, patents, and patent applications referred to in this specification are to be incorporated in their entirety by reference into the specification, as if each individual publication, patent or patent application was specifically and individually noted when referenced that it is to be incorporated herein by reference. In addition, citation, or identification of any reference in this application shall not be construed as an admission that such reference is available as prior art to the present invention. To the extent that section headings are used, they should not be construed as necessarily limiting. In addition, any priority document(s) of this application is/are hereby incorporated herein by reference in its/their entirety.

The application's sequence listing, which the Patent Office published only in electronic form, follows.

SEQUENCE LISTING (7 sequences)

SEQ ID NO: 1 - DNA, 140573 bp, Unknown
  bacteriophage strain capable of infecting bacteria of the genus Staphylococcus
gtttttcaggttctataggtttttcaggttctataggtttttcaggttctatagggggtagtgggttaggggtagggatgttaggtttaggtagaataggattagggttaataggattaggaataataggtttaggtatagtaggagaagataaactaggttcacttggtggctcaacaggacttacaacaggaggtactacaactgtactgacaccattatcttctattatcttaggtctagtaacttcattacttacaacaaccttattatttactaatactaaatctttatccttatcattaccataaatacgttctcttacactcttatcctctttatctctttctttttctgttttatcattataacctttataattagtttcttctttaacctttttaagttcttcctcagccctatttaacttctcaacatacctttttttagttttaccgtcatcatcatctgctttttgataaatttctactagcttttgatatctgtccttatcttctttagcaatttggtacttgttaaatgctactgtaattaatactataaatagagcaactacaatagttataagtgttatagtaatctcattactactaaacttacgtttcatattatttattcctacctatccataaaggtctcataatatctattataacttatctagtttttccttttcttcttcttcaatacgtttcttttcttcatagtctttgcttaacataaatgtaatactaacattaagctcattactagataaaacattacttaaagctgtgtcggttacaacaacatcacctaacttaatagcttctccattttgtacatcttctttaaactgcttgttagcttcaaaaatatcaatattataatcaaaagctaatttaaaaagtttttggtgttcttcacctgttaatgtatcatctaatctactttgaaacaccattagagaaccgtctaatctttgtgtttcatcaatagggtcttgccttaatacattgtaagaactatatagcttattaatcatctcacataatgttttactaaattctttaactttattttctttttcttctgtagaaataggtgtaattaactcttccaatgtttttgtattattatctttaatcattcatatctcccttttttaagttgtttataatatccttttttacttgtataagcaacttcctagtattgtacattcttttctctcttattactacatttacaactactaatataataatacttatatatataattgtataaatgagtacagtgctaaataagctcactgtactcacctaaaaataactttatatcttgtttttttaatacatactcatctttacatttaataaatcctaaagattttaagaactctatggcttgaggtaattctatatcataaacaacagcgttcttgttcttctttattgctaaagaaattaactctagaatagacctagcacctactccattagtttcgaggtctgatacatacccgtgtaatataatgtcggaatctgtttctttaaaagaagctaaccctattgggttattgttatcgtctacaaattctttgtatactgatgcgttgccatctatgtggtcagtgttcacacctttattctttagtgtagaaagagaactggcaatctttttaggattaggtttttcagcatcaccatgagtaagaaccctagaacctttagcagttttaggttcttttgattcttcactattattctctttaggtttatcatcatttttattatcttcatagactgtcatttcaatttctttcccattacgtactacagttctttttactttattcaatgagcctatgtctttagctccacctttgtatatacgttctggttctcttgctatgtataaataacagtccatgaagttatcaaagcctagtgatttatatatgtaatcatatttatcatctaaaaagtcactatgtttagaaacataggataaagttaaaggttcttcaattagtaaattaaatgtctctttacttatatcatcttcttgtattgtatcataatttaatatacttgtcaagtcgtcagtcctttcttagtcatcaaaatagaactcattagacgagttgttttgtgtactattataatccgttggtataaaagtagatgtgaaagctgtaccgttgcctttgtcatataattcttttagacgagtaagaccgatgtaaccaatacaggcagactgagaataatggtcgtcgcctttacgtttaataacttgataaagttctcctgttttttcatcttcttcgtccatgattaggacattttgccagtgcttaagataagtttttaattcatcatctacctgttggtacattcttatacgtttagcttttaaatcttgtatatatcgtttattatgcattaatttatctacagttactgtattactgttttcattaaattgtgcatataattgacctgatgaacgtgggctagacttataagtacaaccaaatactttatccttaccaaagaaattaattaatttaagtacgttgttacccgaatcaccattatctgcaacaataatatcagggtcatatttagatatctctaatattatagcttctaaatctgcttctaccatatctggtctactgtttttcttaatagagaataaacgtattaaatctactttaccctcctcagtcataccatgtacagttacccagtggaagttaccccagtctatacctactgaaataaatttgtatttatctctattaaataactgtgtttttgcaatttctgacttattgtcaaagatgtcttctggtaaaacacgcattttaacatcttcatagggcatcaattactaccgttactttcgtaatactttaacattcatttaagaatcggtttagactatatcataacccttatttttggttaagggctccttgctttacactaataactttttatttaaataattttcaatgtctttatattttcttttaccataatctacttcaagaagtaaataaccgttatcttctgcataacttctctttaactcatctcttaatttttgttttttaaatgccatctctccaccaaaagattttactggttgataatgttgtattccttgatactctattaatgtatcatactcaggtaaataaaagtcataagaaagtgacttattgtaaattaaatcatcaaactttttatgtatttcatatttaatattattattattaatcaaatattcttctacaatcttttctccaatagacattttacatttaggacacatgtctctctccataagatgagaagctcttatttcccatgttaaaccacatttatgtctaactaaaactttagatttagaattaatatactctgatagaacttcataatcattaccgtattttttcttaacttcatctaaaaattgttgatgggttcttctttgttttaaattatgttctttcattctacaatgaaaacatctgcttttccttgatataaaatcattaggtttgacttcccattcttttccacatacattatgaattaactttactttattagtgactcctgtatactcaccaattaaagaatactcatcaccgactaaatcatgaagttcttttttaaattgctttgtagttttagatttcctaccttttcttttattattacaggcaggacatctgttaccatctaaaaaagatttaggctttactaagtattcattattcccacaagtctcagaattatgcctcataagtatttttgttttattatttacatattctcctaaaacttcatattcattcgatactctatcgtatacttttttcttaaattcttctgtagttattttaattgccattttaacaccctccctttctttatacattttttttattaaaagttattagtttttatctagttctcactatatccatttatatagttacctaggaatttagtcgttcggcatttactataatttaattataccatataatgttatcttgtaaataattaaattatagatttagcacaggattgctttatgctttttatagcacttaaggtttccctgtttaacaaggttattcgatatatattactatataaaggggctataccattaacccaaagaatagttataaaatgcttgcttagaatctgtattcatttctttctctactaattggcttgcacttatccatacagcattcatctgtgaaatgtagtaacctctaatacctgaattattttttgttctttctggataccttactttccaaatgccattataccaacggtctaggggttttccacatttctgacaaacgtattgatatgtaccttcttgtactgttttagcttgttcatcaataccatctgggtttaaaagtaaaagattaccactcttatttaagtcattagggtcataatcagcatatttcatttcgttttcatattgacaatgttgacacacatgagcatagtaccattggtcagattgttgatataatttgtgtatacctaccccaggtgctgacggagttgagaatcttcttactactttaaaaggtgaacttgacatagactctaaagccgaactttcggctagtgagttcaccctctcaaattcgtccattgcgaggaagtctatgtcaacaccctcaactgaacctggtttactactagttctaaaaaacaaacttgagtttctaatttgtttatagcctaaggagtctttatcccaattcacaatatctctaaaataagttttatctaatacaggattaagacgtgactgtacaaatttctttaactgctcttgtgtcattttttacccttggtttcccgatatttattaggggattagactatatcatagctactaattttggttagtagctccttgctttacttttttaactaaatacgaaagtatattgtctatttcatccatgttataatagtaaggtattcgtatcaatgatatgttgttatctttggcatatataacagtatactcgtcacctactagattatacacatcttgaacaaactctttatgtgttttctttttagtcattacaatataccttttctttcttacatgtttagttaaaattttcttatactattttcactatatccgtttatatagttattagtaagtttagtcgttaggcttttagctaactttataaatacagtataacatacactacatataaagtcaacagttagcacggttggttcccactgtctgtgtatagtcagatttagggtttcttaccagtatattgttttttctatacattattttactatgcccgtttaacaaggttttaattcccccacactgtttaatcgagggaacgtatagaggcactttacatttctgtaactatacatgtcagcaaagtgtaccatttccattactgacatctcactgagtcctaattgtctactcttaattaccgctttattagggtgactatcgttgacaatcttaacttgcccactactaccctcggtttcccgatatttattaagggtttagactatattatagcccttagttttggttaagggttctctgctttacttctctataaagagttttcttatctagttctcactatctccatttagataactacctagaaatttagtcgttagagtttttcctctacatgttgtagattctttactacggtatcagctctatccattaggacttagcttttcttaccaggatattctttattttcctatgaccgtttaacagagtttaaagaccacagcactagtttatggtctatgagcttgtgctttacttctgtccctgtttggaatactaaaagttatcgggtgacctcgtaacgtatgatattttagcatataagtactagggtttaacatgttgataatatggtcaacttgttcttgcgtaacattttgtgtaccgaatgtttcttgtgttatttttaataattctttaccatccattcatatacacctttctttagaatgtatttgagttctcttcgttcataaccttttctttatcaataatcatagcagtaatatcatcagcagatagttgagataacttctctaaatctacttctttctcacctttactattctcatttgttatttcatcaaagagctcttgttgtggtcttgataattgcggtatagcaccgccaccatcagaaccatctgtaattaagttttgcatttgttggaagataacaaacactttatacaaatcattagggtcttttacttctatttcccctctgtcaatctttttattaaagtcatacataagtttagtaatacctgacataaatccatcagctatatatttacgtttatcttcgtcttcaatttttttcttagataacatatctcttaaactttcagcgctcactctatcaattcacctactttctttaaattcttgtaacagttattaatatctgcgcacatgtcaaaatataagtacttagagtactgtaaatgaaaatgattaactttagctatagctttacctttagtataattcatccctgaaagagattgaccacataaacaacacactctactaggacttgcaatacgtttatctcctttttttgttaaggaaacagcagtagcattatctttcagctctttacgttgttctttaatgtccttcttcgttttcattgacagcatctctctttttatcttttagtattcgacgttgtgcttttgctcttactcttacttcctcagcagaaacattagtttgtgactctacaattttctttagtacttgtaattcattgttatttagctctacttcttttagaatataatcaggtaaggggtcttctttgtgtaataataatttatcagttattgttaatgccacattagaaactatcccaccgaatataaagtaagtcataactgtactaggtcgaatagagtatattaatgacagtgagttaataatagacaaaataaacaaaataaaaataataattattagagttttaaatataaatacagctatgttattattcaccctattagttcagtcctcctaatttaaaatataccgtacactattaatgtaacattgttgatttacaaacaggtttcaatgttatattaaagttgtattatataagattttattatctagctaaaagaaattaggtgtaattagtggttatactagcaggcattatagctatacctctttttattttttatttttattttctgtttagcttatctaaatcactagcatacgtagtagtattaaaagagtgtaaaaacattatgaaatatataggctacttggtggttgtttatatactatcttgtttttcattatggttaataagtacaggtggttggtggttgctaattttattaaacataatacttatatctgctactgcaataactattataacacaaaactagtgtagctcaaaattaattataagggggtaagttgatttgactaagtataaagatatattaaaattagagtttaaagatgccttagctcactttagacgagatagaaaattcttccacgtctataggattgataggttgcttatcaacggctctattatatattttgattattattacataccatctgataatcctaataccgttattaaagaaatagacctccatgagtttggtaagcttaggtttgaaataaatactaaaacgtcatacggtgagatagttactgaggattatatgcaaattattaataactttttcgaaaactatgacgtccattcagaatctgaaaagttagacattaagaggtgactttagttgaatgaagaactaaaaaaccttgtaggacaagtagataagataaaagataaaatacaagatggtagctatattgataaaaatacgtataaggaattagaaaatgaagttgatgaactaagaaaaatggtagttagtttagacaaagaagtagctgttaatagtgagaaacaatcgtctatctacatacagctagatagattagacgaaaagataaaagaactcactaacaatacagttgttaaggacacaagaaagaaggatactaccgagaaagtactattactagtgttaggttctattataactttcattttcaataaatttagttaggagttttgatatggtaaaacatgctgaggtaacaatgattagtggaaaaaaatattatttaatctctgacgatagtattgagtatacacaaagagagataaatggaacaattagaggacatggacaagcatcagttagagttagagtctctgaggatattaattctgatacagtattcattaaccctttattcatagaatcatttaagttagtatttgaaaattagtgacttttaagtaagtcactttttttattactctttgttgactttcctatatatattattaattattataactagtattattattttagtatttataattatttattatatatataaggaatcctccttattttccaaataggtaaaaaaatctttaaaacccttgatataaaaggatttctcaaaataattacataaaatttaacaaaaagcattgacatttattaagtcttacgttagaataagagtatcaattaaaagaaaaggactgatgtaacatggaaaaccaattaatgtttaattttgaaggagaatcagtaagaacagtagttaaagacaatcaaacttactttgtaggtaacgaagtagctaagatattaggatattcaaattatcgaaacgctataaataaccatgcagaggatgaagataagctacgtacccaaattaggtacgcaggtcaattaaggactgtgacattaatcaacgaatcaggtttatacagtttaatcttttcatcaaaactagaatcagctaaacgattcaagcgttgggtaacttcagaagttctacctgatattagaaagtatggaatgtacatgaatgatgattttgctaaagctattatagataatcctcaagaagctaaaaaagaaatgcttaagtactttgaggagtcagaaagattaaataaattggtgactgatttacaaaaagaaaatgataggttatcttcagtagagaacgaagttatggaattagaaaataaactagagtttttacaaaaaagacctgaaaataatgattggaaacaagaagcaaataaaagggttagaaaattaacacctaaaattagtagtattatcaaccccaactttggtaaaacatggaatgaggtttataaagaaatgctatattctcaaaatctcaatattaaatcaaaacatactcgaagattaaagaaaatgaaaagtaataacgttcctcaaagtacaatagataatacaaaaattattgacactataggaactgatattgagtacgttgataaattattcaaagccctagataacttagaagataaatatactactccagtatcagaagaatacccatcttgtttcttaaagcttgagtattaaaaattaactagaaacattaaataaaggtgtttacctaatactcaacacctgatataatataaatataaaacaaattaaaagaaaaggattgataatcatgaaaaaaagacagaaaatgttccacagtaatttagtttgttcaaaatgtggtaatacttttacagtaccaagaaaaagagctcagaaaagagaagagggacatataaagcatttatactgtatcaaatgtaaatgtactactgctcacattgaggataatagaacagaatcagaaaaatattgggatagagtacaagaagaattatcaagataaaaaagtaaaaaataacttgacaaactcaaaatagtatgttatattatatataagctcataaagagctataatttcattttgcataataaacattcttctccttatttttatttgtcgaaactaggtcttttattacgtttttaccctagtataaaaaaactataaaacgtaacacattttttaattgacaaatgaatgataatatgttatactttaaatgtagtataattaaacatacatacataatggctgatttaaacagggtggtacctgtaaggcgtaagattgtcgaacgaattaaaacttatcggtatacgtcggtaaggtaattcgtcaatagtaatgtttattacaatcggaatgcttagcagtaatgtattaggtttataaagtatagtatccgatgggcttaatttttgtagggggttttggtggtatcctttacaaatacaccttaacaagtacatgcagttggagcattgaaaaatgtttgataacatacgatactagtacgagtagcataaacctgcaaaataataattggtaaaaatataaagatgccgttaaaattcttcataccatgtgaaagttactaattaatatgttagtatcacattacactattaaacggactcaaccctatggttgtactgctttagtaggttacgtgagatggacttaggttagctacctaatagagtcaagcgtagtgattaacttaacaataggtctagtatgttacttaccagtgagacggtttatgtatgtatgtttaattatactatagaagggtagatactaatatggcatctgcaaaacaaatttattatactgaaagtttaatcggtagagcaattattaatgaaaaattcacaactaaaaaagatatttgggataaattagatttacttccacacactaagttagaagacttagataataaacaaatgtcagaagtaatcaaaacactttctcaaattaacgaacaataacttaaaatttaataactaaaaccattctttttgttatattattattagctttacaataacagaaaggatggtatttttttatgtcaaaaaaagataaaaaaccattattaatagcaggtaacaatattactgcaaaagcaaaaagtgctacattttggacaggttttgtacctgttttagctacgtttattgttagtgtatgtagtttactaggaatcaaaggtgcagaagatattgtaaaccaaggcactgcaattgcaggtgtagttattagtttcttgactggtttaggtgttcttgtaagtcatgacactaaaggtatagcggatagccctattgtacaggactttaacaaacctagagattataatgacccagataaagctttaacatacaagagtgaagcaatgaatagtacctcagagttacctcctacaaagatgccgatggctcctgaaggagttaataatgaagacatagatacaagtcatgcagaaccattagaacatggtaaagtagaaaaagacttagtgtctgaattagataaagaagataacccaaaagaagtaggtgaacagtaatgatagaaatttggaaaggtgtaaatgttagatatgatttactgcctattggaacaagacgcacaggtcaagctatggcggttaaaaaacccgtttttattgtagctcatgatacagggaatattaatactacagctcaaaataatgtagattattacaaaaatacatataacattgattgggcttccactgcatccgcacatatctttgtagatgataaagaagctatcatatgtgttcctactacagaaaaagcttggcatgtgttgtataacgctcctatggatgacctatggtacggaattaacgctaatgatggtgctattggtgtagaaatttgttactttagtgataaagaacgttctaaaaaatcattagacaatggagctcgtgtcttagcttatttagctgaatactggggtgttgattacaaaacaaatatgccaggtcaccaagacatccaaaacgacaaacaagacccaggtaacttattagaagcatgtggattaggtagaaacactagtaacttagataaggaagtagctaagtattacaagaaagttattaagtcagtagatgtaaagaaatcaggtaatgctgagcctagagtaaaaacacaatctactaaaactatgtggagctggaaaggtactttttatccagatagagctattaaagttagaaaatctccaggacttaaaggcactatagtaaatagagattcatggctatacgataaggatgattgggttgaatttgaccaagttattaaagtagacggctattggtggattcgatttaaatatcaaaaaccaggctctagtaaaaattatttctattgtgctgtatgtgagataacagataaacaagagcgtattaagaaagaaaaatattttggaaaaatagattggaaataaggagtgaaaacttttgaaagcatcgatgactagaagtgaatttgttcgatttttaaaaagtctagaaggcaaagcaatagactttgatggttggtatggtcagcaatgttacgacttagctaactatggatttaacaagctcttcccaggttattctttaggtggagcaagtgcatgtaacattccatgggataataaagctatgttaaaagataaagctagagtagtagaaaatacactatcctacattcctaaaccaggcactatggttatctttaataattcatacgggggcggtcatggtcatgtcgcatgggtactaagtgcaaaccaaaaccaaattatagtaattgaaaataattggttaggtggaggttggacttggggagatgctcaaggaggcggtggctgggagaaagctaccgttagagcccatggttacgactttcctatgtggtttatagaacctaatttcaaagacgaggtacaaacaacttggaattggggaggtaaatttactgctgatagaacgattaaggtaagacgcacaccaggtttaaggggttcaatagtaggtgctgaatcatttatttatagtggtcaatatgtaaactttgaccaagttattaaagtagacggctattggtggattagatttaaatatcctacaaacccgtcagctgggaacttctatatggcagtatgtaaaatcactgacaagtgggaacgtatgctaaaagagaagtattggggtcgtattaactggaaataatgtactagggaaaattccctagtacttttttatttttaagttgacaatgtatttatcatatgctacaatacatatataagttttaaaggtggttataataaatggaaaaattaaagaaatggtttaaacgtaatgtattaaaaagtgagattacgcagtacaaagtatatattaagcatacacgttcaaataaaagtaatgttttctatgttaatatgaaagctaaaggtaaagtagaggctaaagaaaaaacgcttgacgttttaaataagtatgcttataataaaaataactatagtattttaaaaattgaagaaagataggtagtggtttattatggaagagactaaagtattaaatttaaaaaaagtaagagaagaaaaaggtcatacagttagaagtttagcacaagagattggagttcactactcacttatttcttattgggagagtggtaaaagaaaacctaagagtgctaatcttatgaaattagaaaaagctttaaatactaatagtgtagaattatttaaagaggttgatgttgatgaataaatttacaaaatctattattaactttgttgagcgtcatgagattgaggatatgattaatatttttgaacttcaagatgttaataaagcaataggagacaaagcattttatactattatagataatatcttaaccttagataatatagaagatagagctattattttaacttctttagataagttattaaacactaataggagttctttagttgattatgattctaaaaaccctaatattagaatttcatatagtactgaagaaaaaggtaatacaatgcaaaaagtagtagagcatttaagtaataaattagataattgtttatatcaatcttaccctaatatatctaaatatagtattattagaagtacggctgagttattaggagacctatcgtatatcgaggattattatactggtgatgacttaacaaacattattaaagacacacatctagaatatatacacaacatcattaatagtagtgaatttgatagtatcacattattagagcagtttgaacttttagaagagtcatacagacttgaagaagtaaaagaaaaattagaagagctagaacactcagaaaagtacactgaaattgatttaattaagtaccttattaaattataaaggggttttttaaatgtttaagaaattgttcgttattttagttgatggttttgaagttaatgttattgcagatgactatatcgaagcagaagaacattgttataagttttttgatttctctactataaaattacaagactacaaagagatttatacaagtgagatgttcccttgctttgtagaagggcataaatatgcataagactgcattaatatatacagatggtagctcatcttataataaaggtcttgttggagcaggggctattattttagataaaaatgagaacattgtaaaagaaatcagtaaacctattgaaaatagtagtttaattaagtataataatgttgcaggtgaaatactagcttgttgttatggtattgaagagtctataaaactaggttataagcaggctattattcatgtagattatataggacttattcaatggtatgaaggttcgtagaaaactaaaaacaatttaagtaaaacatatattaatatgctaagggaatactcaaagtttatagatataaattttataaaagtaaaggctcatgataataacaaatggaatgaatatgtagatgcattagcaaaaaaagcaattggaatataaggagaaatattatgatgaaaaaattatcaaagaagtttcaaaaaggtggattttgggaaaagttgtttttatttacagtaacaacattacttgtagtggctacatggtttttagtagatagtgtgatgtttttcttgcaaacagtgctaacattctggggattagtattattagcacctattgtagctctaggtattattgcttttagtattttaaagtacccaagagtaaaggatattaatgattactcggaaccagttagaaagtacttataaggagactaaaataatgacataattaaaagttaaggtaggaacaaataaagttaaaacaaaagatgttaataaaattagtgagtacttaaaggatacctacgaaaaactagatatggaacaatctatagattttcaaaatagaacaccgtatttaattagtgatgacggtacttttattgcacagtatttagaaaaagcaaatgctgtaggtttttataaggagtctattatacaaggaaaagttaaacaacttgttcatgtaacacctgcagatatagaacatacaacttggactattgaagaagatgatatcgtagatgtgtataatgatgaactacctgttggagacattatcatttattttagtagaagtatcagtagtgaattgagtgcttatttattacctcatgtatcttttagagaatatatagatggtttaggattacagacccttagttgtatacctaaaatagtttacacaggtatttcaaaaggtagaagagaaaatattagttttgatgtcttatgtactgtgacaggtgatttagagtttattaatcgtgatggtggttggaataatgacacctttactacagcggagagaaaactacaataaaatactataaatttgggttaacgcaaaggagggctaattttgaacaattacttatttaaagactataaccatttgttagataatacaagatttaaaataaaagtaaaaggaaaaacatatcatgtttatattgctacttccaataagtcaataggtgtactaacaagacgtaaaagtttttgtgctacgtactttgaggataaagattattttagtagatatacaattaaggaatttattgattttattaaaacacttattattgaagagatgtcttttgatattgaaaacactatgacaaataaaaaaacagaaaaacaaattaaaaaagaaatcatgaaagataataagttaaaagatggaaatatagatggtataaacagacatacctctagcatggatgttcttaaaagtgacttaagagtacttgataattaaaataaaggaaaggaatattaagaaggagactttttatataggataggagaggatttgttttgtcctgctatagtatataaaagaaaaggaaataaaaccattaaaaccagtcaacaatatagagatgtgttctcagttaactttacaaaaagagctttttctaaaaagaaatggaatcagttgacagtaagttctagaggtctatatattgatgaaggtagaaatacagtactaggaagaaggtataataaattctttaatatcaatgaagtagaagaaaccaaattggagaatatgccagacactatccaattccctttaactggatataaaaaagaaaatggatttttaggattaatgttctatgacccgttagaaggaattgtatatgcaagtaaatcaaaaacacatttaagtggacatgggaataaatatgcattattatttaaagagctggtagaaaaaactttaactaaaagacagatacagacattaacaacattccttgaaaatcattatattgctgacgatagttttactttagtgtttgaagtagttgatatcgaagaagaccctcatatcataaaatatcgaaaaagcgatatcttcttacttgatattatttcaaatacgttaaatatgaaaaagaaagattatgattatttgaaatatgttgctgatgaagtaggattacaactaaaagaaaaagagttggagtttgctagctgggaagaattttataaatggtataaggataataatggctcttataatatattgcatgaagggtatgtatttgaagatttgaaaggatttatgtttaaatataagtctgactattacaaagactggaaatatatgagagatatagcttactccttatcacaaagaagagatgtaagacctaagcaatatattttaacaagaaaccctgaacttagagatttttattattgggctaaaatgaaagactcagaagaactgaataaagatatcatcacactaaaagatgagtttgaaaaagaaaaggagaagtagaatgacaaatttaatgaaagaacttcaggtgtatcatgcatcggatatgttgatgcaagggttaaaagaatatagaatcaaacaaaaagaagagatggaaagtattgttggtattaaagtttttgaccctagctcacaatcatttaacgataaaaagaatacagactcacataagttggcagaacgaattgtagaaaacgacacgtgtgctattgaggaatctgatatttatgttattgatttgcctattagcggtaatggaggtttaggaaccatcaccgagttaggtcaaatttttcaaatgaaaagacaagcacaaattactattgacaggctaaatgacttatatgatatttattaccttgatgtaaatggtgaattaacagatgtagcaacagttttagataaagagcttgaaattaacgagaaaatactaaataaacctgttttaatttactctagtgacatcagatggaacacaacagatatgcatgatgatatggatagagttccatattcctttaacgcttacgtatacggagtagctttatctttaacagacggtaaaggtgttatttcatgggaagaagttttaggggaattagaaaagttaggtgcatctaatgtctaatttagctcatatattaagcatcctatatgctatattagttactgtaggatatatacctgctttagtaggtttgataaaagataagaatgttaaaggtgtagatagctatttttggttttatattgttgttacagtaagtattagcttaacaagcttatttgtaacacatgcacccctatttcaaattatatcagtaagtattaatttattactaggtattatttgttttattatatacttatttagaacaacagaagttagtattttagaaatggttatgtttataattgttatttatattggctattcagtagctaactatagtgttgaatatggacagataatggctactattagtattatcgtagcttatttatcccaaataaataaattttataaaactaaaagtacaaatggaactagcaaatatttatttcttattataggtattgcattagcttgtttaattattagtatgttaataacaaatacgacaccacatgtaatatatacagaagtagctaactttattcttattatgatatgttacctacaggcatcttattatgaatataaaggcgtagataacaatgaaagacttaatacaaaaaggtaataaattttattataaggttagaaatggtgataccttatggactataagtaagaaatatgatgtgtctattaaacaactacaagaacttaatgatatgacctcggtgtctttatcagacaaagattgtatacttgtttatgtagactagaaaggacttctatatggatttaatagataataaagaagtaactagtaccgatgagattatttttaaaagtaaatctaaaaatttatatattagtgacatagatataatatctaaagttactatgtacacagatgagttagaggaagttttagcaatgcctaatactattaactttaaaaattctaagaagtacaaagacttaatgagtaatcccgatattgtacccgtaagaagaactaaaaaaattaaatatgaaacttatctagaagaactgtaaaaaagttcttcttttttgttgactattaaatttaactatgttatcatacttatataataataaatgaggtgatgacacatgtcagtagaatataaagaaacaggattaacggaagaagaaattcttaaattgtctaaagtaaatagaaatagtatatttataggtgaagaaagagtatatttaaaaataaataataaaaatattgtagatattggctctaaagaattattaagagatattaataataccttttgttattctagcgctttaaatttacttttatttatagcattatgtggaaataaaaaacttactacgtttaagggagacccatataaaaaagtacaagagttaagtaaaacagttacagatgtaaatactgtatatagtgagtatatagaaagtgacgataggtctgaatttcctttatataacaaaagacactatcgtaataatatatactgccgtgcaaactatgaaaatgaactaaaacagtttgacaatacgcaaaataagaatagtaataattaccttacaaaaaaaataagagacttaaaaagacaaataaatactacaactaatgatatacttgatgtattattaatgggtgattatagtatatttggtattaatattgacccttatgcatttggtaaatcttatgataataactacgaatactacaatgaagttttaaaaaatataaaaatagggcttaacaaattaacacctataaaagataataatactccgtttttaattaagacttgttatttaaaagacataagtatagtaacaacagattggagtatagtaaacggtgactttaataataaaaatggaaatgtatacctacacctatcaaatacactacaacataaagaatttaaatttaatatgtatgaagatgattttaataaggataaactaaaaaataacattactttacctgtccttttaaatattattttaagtaaatatggaaaggaaaatttagcttttaacataataatccaaacactaaagaataatgattattacttaaatctaagtagacttaatgtaaaaaactttgatgtatactctatgatagatagacctgatggttatctcacagttagtaaaggtgaaaatgctactgataatttaaacaatctgttaaaattagttgtgtctaatattgataaagtttataacaacgaagattgtgatatatttaaagaacacaaagagtttctagtaataccaaacaaaaataaatggaaattacatgaagctttaaatttaagtaaacaaacatataataagtttattactcttagtaaagaagagcaagaaaattaccttaatatacttcgagttatcataaataaatttcctagtttatataatgagtctaacttacacaaactattcgatgacgactttataatggtgactaattcatattcaataggaaatgctttatcttttaaaggtactacgaaagaagttcttaacttttcattttctgactttagaaaaatggtgaattatataaactatgatgtcagaaacagacaacgtatacattcatacgctgttaataatttatatagagattatatagactttgcttcagacctagtacttcttggatatagaactaaagaaagtattaacttaacaccatattctttaaaactagagcatgatattgttactgatgagtatttaacagttaaagatgaagtcgatgacttaaagttacaacaaaaatatgataataaattaaataatatcacaaataaagaatataagttaaatgatggctctaaagttaaatttttacctgcggatactactgaaaaattaaaaagagaaggtgaacagctatctcattgtgtcggcagttatgcttcgaatattataaatgacagatgtttaatattactagctagaaaagttgacgatttagaaaaatcatggtatactgtagaagtaaggataacaaaatatggatatacgttaggtcaacaacaatctttaaaaagtcatgagttacctaaagaattaaaagacgaattaataaaagatattaaaaatataaataaacaatttagtgaggatgttgcgtaatggtaaaaccagttataactttagaacctaaagaagttaagacattaatagagtatttaagtcattttgaagaagatgtacgaaaatataaagatatggagaaattatatgaagaattacacaaaaagtatcagcttgctaaaggaaactacgttgagtaatggaaaggtatagtaaagaatatgtagatatagacattacagttagagcattagtacaaacaccttatagagactcatatgatgttacaaataatagaaacgaattagtagaagataatatcgtcgttaatagtttatcagattatgttaaagtacaagaagttaaaataaatgatatagattaaaaggcaaaggaactgttatattatatgtgtactttatagtacacttccataatatctttccttttccctatctatattctagatagggtttttattttagatacgaaaggacaccaatatggatactagagaatttattgattcacaaattggaagtaacaaagaggcaacagaattaaaagaattaaagataaacattgttgaagcatctttagatgtgacacattctttagatgacacattatattatgctaaaaagcttatgaaaaatgtagaacaactggagttatactataatgtcaactctaccactaatacaccgaaccattataaaggtaaaaaagatgttatatcatttttagaagaatatttctacattactggctttatagactgcatgctatttaatattgttaaatatacaacaagattaggaagaaaagacgatgaaagaaaagaagtagagaaaattaaaacctataccgaaaggttgttaaacttcatagaatatggtaatagtaatggaagaggataaaaaaaagatacataaatacttttgttacctatacttttcagattacttaccatcaaaaggtatagttgttttaaatcataatgttacctctcatgctacggagaacggagttaaaaattattacataggtaatattctaatagataacgcagaaataacagttgttatagacttaacggatttacaaaaagcaagtagtatgcaaaatatgttagaaatattgaataaaaatacagaatcttgtatctttaaaagcaaagaattaactactgagacggtaaataccttctttaaaggagaaattttatgaaaaaattaaatatatgtttaactattatatcattctttatcacatataaagtgttaacaaaaaagaaaaagcatacacatgtcattgtagactattcagtacaagaccatattcatctaaatgatatctgtaactaaagggcaatttgccctttttttgtgttttatgatatattaacattgactaatagtaaaggagattttcaatgcctcatttaaaagcatatgataaatacggtaatatattggcaataggttacaatgtagagttacatgaagaagtagggtctgtaatcatacctaacttagctcctcatacccattaccctcaaggtgagttctatgtatcatgggaagctgaaaaatatgaaaccgataaagtagtagttcctggttttacaaccctagaatcatcattcaaagaaataacattatattttaaagaccatatacttgtaaatgctaaatctgcttatgatgtagcggtagataatggttttgtcggttctgaagaagaatgggttaagtctattaaaggagaaaaaggggaggaaggggaacaaggtaagcaaggtttaagttcttatgaagtagctgtaaataacggttttacaggttcagctacagattggcttaaaacaggtaaaagtccttatgtatactctaacgagtatataaagcaaaaagatgatacttcggatgttcaaaggttaagacgtgctattaaagatacaagtgaaggtaataccctacacattccttctagtgaatcacctattaaaatagatgatactttgataatagataagaatattaatattgtatctgatgctaagattgtttataatggtagtaaggataaaccagctattaaactagatagtttatcatattctaatgttacaattaaaggtatttatgatgatagttcttatccaacttatggtggaggctatcatggttttaagagtcaaaactatataggactagaattagttaactgtagaaatgttaatactaatattaatgaaattattggttttacagtcggtaataaacataaagctactggtggtaaaggtcattggtttaataatactattattaatttctttattaataatgaaacacatatagaattaaatacagatggtataggttctaatggtgagcaatcttggatgaatagtaattacttctataaatcagctttttcatatagtggcactgagtttaataaacaccctaacacatactataacatcaaacaaactctaacaaatgctaatacctatggaggaaatagcaatgtattcgattcacttaaatttgaaactgcttccccaacatctgaaaattatgttatggtgtatcttaaaaaagcagtaggatttatatttaagaattacagatttgaatttaataacaaagctacctttgctattatagatttagaaacacaagacatgacaaaatcttatgtaacacatagtaaagatattaagtttattcctgaatttgttttaggtaatggacataaactaacgtttacaaatattaatactgctaaaatacctagaagtagtattgctaaaatagtagacgaatacaaaacaacattattgtataaaaataatgattttagcaaagactatagaagattagggggtaactatcacacagtcaaaaatgtatttagaaaaccattacagtcaacttctctgacagataaagtatcttatgactatagtactacacctagtttagtagatgataaaggactacttacctttacaggctcgtaccctatggctttatatgttaataatgttagtgttggtgacgagctaattattaacaagttatcatttataggtaattctagtggtatatttattaaatgttttgataaagacggtaatatattagacaaagtatctaataattatgatacaatattactagatggttattataatgataaatataaagcgttcactttcaataacgcccaaaaagatacttttactgttaatagtgaagatgttaagtctatcgttattttaatatctggaactatgcaaggtttacttgtaggttcaactaatccatccaatattattaagtcttcaaacgatagtagcaagaataaaactgatgttttttattctcatgttaaaccttctagtgttgaagattttaaatatgatgaaaaagtatacaacaatggtacaacacaagtatatggttgggtactaaaaggtaatgattggaaagaactaggtaaagacactaattctaagagtaaagtaatagttaatatagaagattacccaagaattaatgatgaagataatgactatcctagattccaaagagctttagattatttaacaagtactaaaggtggtactcttatagtacctaaaggaacagaggactatttattcaaaactaagacacctactgtacaaaacccatcacgtgtaaaagtaacaggaagtaatatacacattaaaggtgaaggtaatcctacatttattatgtcaggaatcactaaaaactatttagactctatagatgatatttcttctagtggtagagatatgtttacaggattctcatttatcaactgtgataacattcttgtagaaggattaacatttaaaggggaatgggatagtaaaggtgaatttagatatgcgtcacctcgttctattggagtagcgtttaaaggaagtagaaactgtaaagcatataatgtacatggctataatatcatgggtaatgttgtaaatgcagtaaacactatgcaagcagtagatggtgtttatggttactcagacaacattactatagatagttgctcagctacacaatgtttagagaatggttttaactttatgggtggtactaaaaatggatattatgttaataatatatctacaggaaatggttcaagtggatttgaatcaggaacagaaaatgttattataagtaataatatacacacaaataataagtactcaggtttaagtatatctggcactaattacacaattactaataacgtaatttatggtaatagtaataaaggagagttaagtaataaaccatctaatggtattgctattacaggaggtagtaaaggaattattagtaacaataatgtatcaggtaatgagggttacgagttgtacctttatccaggagttaataacatagatatacaaaataatgtattaaaacaagatacaacaagtttaaaaacaagtattatttatgcctcaggaacaactagtaaacctgtgtcagaaattaactttaaaaataatacattaagaagtacaaatactgctttggataaagctatgttcttaaattttgttatggatagtacaattactaataatgatataaaaacagataaaggtaatgattcattaagtgttcaaggttcttgtagtaatctattcgtattaaataacaatatgaataaaaacttaagtatttctagtaatgcatttaatgttataagtaaggataacatagcttataatttacctaaagtactgaacggtactgcaataccaactacagggagttggagattgggagatattgttgttaatactagtagaaccctaacatcaggtagtcctgagaaatggagatgtactagtgatggagttgctactaatatgaagtggacatctaacacggattacacacaaggtcaaattgtttataatgggagttatgtatataaagcagtagcttcaggtacaagtggtggaacacaacctactcataataacggtgttatatcagatggctctatactgtgggaatttatatccacaaaagctaattttgaagtcataagccaaataggtgtaactgaaagcattagtaatatacctttatataaaggtcagattgctgtagtaggctcatctgtatatgtagctaaaggtacatcaagcaatactgattggataattttaaattagtaaaaaggggatttaatgatgatagaagacaatttatatttatttaaagcacacgtggacaaagtagtggatggggatactatacatgtaactattgaccacggaatgagaacatattctgagcaaagaataagattactaggtgtcgacacaccagaaaagaaacaaaataattaccaagaagctaaggaatttacaacaactatgttagaaggaaaagatgttttaattcaaacatacaaagatgattcttttggtagatatttagctaaagtgttctacaaagaaaataaagagtataaaaatattagtgaagaattaattaaaaaaggattactaaaagaaaaaagtaaatggaataaagagcttgacaaacaataaaatatatgatatactattatagtagttaactaacgcctcttaacaatgcgaaacacagttagcattttttaaccttataatgagagtaacagcctaactatatgggtactgtaaaatcattgtattctacctatctaccaagcgtagaaaaggtctacggtaacgttatgactctatttagcgttactagcaatcctgagtaatggtattggctagttgtagctacctagtcagggggttcgagtcccctctcaggattttttccacaagatacctactaaaatatcttacacctacttatttttaaagtaggtgtttttttttattgacttctatttacttatgtgttatatttactatatactaaaaaaaaggaatgattattaatgactaaaaaaattaaaaatattgaaattgtttttgaaaacttagatagtgcggtattagaaccagaaaatgtagagttgatactagaaggtattagtgaagaaaaaactatgatatatggaaatagtgaagtagatacaagtaaatcagcaaaaaaagtttctattgaggtaagtggtatgaaggatgaatactttgaagagtttcatggtttcttagatgagccctacaacatgacattatatgatagattaagtggcaaagatattgtttgtgtttgtttgaattatgaggatggtacagacgatactgtatatgtaccttatcctgagtatgggcagtataattatatgcagagaaataagtacgaaaaagaaatagacactttatttattacaatagaggatagagaacaagaagaacatgtaccaaatgatgaaaaacctaactttaatgaaggtgaaacagaagaccgcacgctagaaggtttagttagccaagtagaggaatggagtaaagataaaggattgaacaataacaaccctgatagacaagctcttaaattctacgaagaagcaggtgaagtagcatcggcattatcacgtggtaacctagaagctcttaaagatggtattggggacactgtagttactttaattattttagctcagcaacacgacatgtcattacaagagtgtttagagtttgcttacgatgaaattaaaggtcgtaaaggaaaaacagttaatggtacctttattaaagaggaagatttaaatgagtgataactttagtcaatttataagtaaaaaaagcaatgaattaaacaaagctacagaaaaacaaaaagattttatctataatcatatagattgtttatatgatgagtcaacttttgatatagagtcattaagtaaagatgaagctactgaacttataaatgatataactatagagttaagctgttcagatgattttcttgattggtatgattatcagtaaagaataagcaggtaaaggttttgaaagcccttacctgttttttatatgctatattattagtgtattacacaacagaaagggataacattatgactaaaaaattaaaggtctacaacaaagaggaacagcttattttaacttctgatgaagttacaggtagcacagtaaaagtaacattaacagatttaaaacctaatactacttataataaaggtgattttaaagtatcttggttagtagatggacaagaatctaataaaacagacgtgcctagtttcaaaacattagagagtgaaaaagaatctgtagctcagcctgtcattgtaaacacactagatatgggtactgatggatacacaataagtaatgaaccgcctaaaaatactaataagatatggcttaaatcagaataagaaaggataactcagaatggcaaacttattaccacatttttacaacacagaaacaaataaatgggaagaactatatacaaaacctattgctagagaagtatttaatatcatgaaagaagattatttagctcacaaaggtgaaataggctattacattgctaagtacaaagatggagacacaagtattgagcaacctaatgttgttgttttttatgatgttaacgattatgaaacaatgactttaaataaagaggaaatgacaagactattaaatgattatatagataataatttacaaggaaagtttaaacccttttctcttactaaattcttacaaaatttagaagaccttaattacgctttaccaaaacaagaaaaatttcatgtagatacaatccagtcggataaaagaaaattttcatttcctgatacaaatgcaattaacacaaaccctgatatcttagatgcccttacggctacagataatcatgtatatatggaagtaaaatatttatataatggtcatcctattgatgataaaaaattaataaaaggaaaccaagatttaaaaaattaataacccagtaaagaacctgtaaaaaggttctttttttttgcttactgaaaaaagtgtatagtattagttgaccctatattgattatatgttatagttaacttaacttaaagaaaggtttgatagatatgaataagatatatgttatatatgcagaagaagattcctattatgatgaagaacctaccttagaagtaatagggtacactactaatatagaagaagctaagtatattaaaaataattacgatgcatggtgtcgtattataagagtatgggaagttgaaagacttacaaaagaaatacttgataaagaacagaaactatataaactaatgtcaacggcagtgatacaaagagagcaacattattttaaacccatacaagagttcaatacaattgtagatgaggtgtttagtttaagtaaaccagatattgactttaatgagaaatgtgaaattagcgtttattcattaaataaaaatcaaattcaggtagatataggtttacttttccctactgaaccaacagaaaaagaagtaaatagtattgttaatgatgctaaaaacaaaattaactttatattaaagaactgtgaaaaagccgacattagagggacagaaaagattgtaaaaatgataagaaaattaaataacaaggagacataaaaatgaaaattaaagtaaaaaaagaaatgacgttagccgaacttatggaatgggcttgggaatatcctgatttaacaaaaggaaagagattttacacagaaaatcaagataatgagaactttgtttatttttcttcggaagacggaagaaaatgtcttgttagtgaatttatatcagctgacgacacttttgaagtcaaagttgaagaggaaatcacagaagatactaagtttgataggttgtttgaagtatatgagtttcgagaaagagcctatatgtcagcgctgcacacaaataccagtatcaaagaacgtttaaagaacacgtctttccctaccaaagcattctatgtcttaaacgatgacctaactacgacattaatttggaaagatggggagttggtagaatgatgcaaacctataaagtaagtctttgtatcaagttcttagcatctaaatgtgattacaaaataaaaaagcattattctgtgcaaagtacgaatgaggaagaagccataaatacggcgttaaaactgactcgtaaaaagctctcattcaaaactgcaagtataagggtcgaaaaagtggaggcagtagaataatgtctaaatttaaagcatggaaaaaagatgaggaaataatgttaggagatggtaattttattttttctaaggatataaagttactacaatacacaggacttaaagacaaaaacggtactaaaatatatgagggtgatattattgagttcgaagatgaagtgttagcaataccaggtgattttgaatctgcagtagaaacaattaacagagcagtgatatctattgatgttgtaagtggcattcacttaaaagactttatgtttgagagcgcaatctctgaaaatgattactttgagtatacagacaaaaaatctttccttatgtacgactgtgaggttaaaggcaacgtatttgaatcatctcatttattggaggtaatagaatgataccgaaatttagagcatgggataaagaatcacaaagaatgtttaatattgctagatttgactttgcagaccatacagtatattcacacctatttgcttgtgatggttacttaggagaaaaccttgtaattatgcaatctacaggacttgaagataagaatggtactgaaatatttgaaggtgatatacttagatattggggggattgtagacctgtaatatttaaagaagcttcttttggatgggttgaagggggagattacataccattctctatgatgtgcatttcagagattggtaatactgaagttgtaggaaatatctatgaaaaaaggagtaaaaaagaatgaaatattaccaagtagagcatgataattgtgagctatacgaagacagctactcttatagagaagataaaatatatactagtaaagaacagcttattaaagacattaaatctgaaggatacaaagaattacaaggcatgtctagaaatcatgatggtattgtttaccttaaacatatagatgattttagagatgatatgattacaattcatgaaatagaaattatagataataaataaaggggtattatttatgtatactaatgaatttattaagaaggtaaatcaattaggatatgaaaccagcctcgcaaataagaatactaccaaaaggaaagaaaaaatacttattaaaaaagaaaaccaacaacctattgcttgggtatttctcaatgaaccatattcttttcgaagcttaggcacagatagtgagttatttgatttaatggtagaatatgcaaaaacacctgtaaaagaacgtagtataagcaatatagcaaaagtaaaacctttagacttagatacccttacagatgactatgctaaagtaagagagtttatgctaaaagtcttaatagacatggaagacgtagtagagtatattcagtacacaggatataataagaatatcattaatcaatggacagatggtcagacatttagagcgatagacaaacaaggatacaatagcctgtttattaatgcaacttcaggtattgaaaaagttttacatggtaactatattataaaagataaaaagaaaggtttcgaacaagtagatagagaattatttgaatatagatatgatatgtcacattaaatacctattaatttaggtgttttttatattgtaagaaatagagtaacactactactataatagtaaaggcagtagagatagacaggacaataataacagtaaaagaaatcttaccatgtttactttaataacaataataaaactatgttgactttttattattatatactttataatgttgacttttaataataagttatataatattactcactactaatagtacatagtataactagttattaaaatggtatactaaagaataccatagaaaactatatataaggaaaggctcctatatactaaactacttatatgctgtaatatactaatactctaattaagtgtaagggaagagggggatatattactaactttattgtaaaatgaatacaattagttattagtaatgttgacatagtttaataaagtaatggttaatgttgacttttaataataagttatataatattactcactaattaggttccttaggtagccccatagccctgtcagacccacccactttagtggcattttacccctgcccccgtataatatatttatattaacctattgtatacaatcctaataaataataaaaaaaagaaagggagtttattccctttcaatttgttttacatcatttctatagcttctgctttaatttgttcatagtctttaatgtgtttattaaactcttcaacacgcatatgttccaatatataatctgctaactcaaacactttattatcaactagtcttattgttgtatcgtctgtaaagtctaggttagacggtatatattctaatggtgttatgtctttattctcttttaattggtttacaatatgaatgtatttgcatagtaaatcgtgttcaacaacatctacctctattgtttcatagatagctgttaataataagtcaaattcaattccttcaagttctgctgtttgttccatttggttaagtaatttcatagtttatcaatcccttttcttttatttgtatttccttaattacattatatcaaatatacagttaattgcaatagttttagttaattattttgggaagttttacactaatgattattcagtaattcttttattacgtctggtgctagtgttgttatgtcatagtcttgtcttaactcatctaaactattgtactgtttaatcgttccgctgtctttgtcactgcctttaattgtttgtttgcttactgtttcgttaatagcttcatcaatatcagtgaagctattaacgttgtccattatatctataagttctttatcagataagttcatgtgtaatgtctccttagaatagcatttgttctgcattaaattctagtgtttcaatatccataatcatttgttcaaattgttctttgttcatgtggtttaagataacgttagtaaagtgttctgctttgtcttgtgctaatatagccccctcgtaagtgctgtaatcaatgttagctggtttacgttctgcttgtgttaatgcttcattgtttaataactgttgttctaagtggttgtatttatctaatgcatcatattcaacaagctctgtcataaccgcttcctcaattgctaaaactaataatctttcaagtttagtgtttccgtttgccatttcttttactgtgtttttcataatttatcaatccttttcgtttattgtgttttctttatatttatatattaccatgtattttagtaagtgtcaacacttttcttaaacttttttaataagtttttttaaggtgtgttgctatcccttacatttattatattacaatataatccagtatatgtaaagtattttattaaagaaataatggcaattttacactaatttgaagcggtttgaaaacataaaaaaaataagggttattagcccttatttaataaagatgttaatattgtcttgtaatctgataaaccaatcaatcaatgtaattaatgtcgtaccacctaatatagttacaatagcgtcagtcttttctgttgaacggtatttcttacctttgtatttaaatttaatcattatagttagtctcctttataatcttcctgcattaataaataactctaactgtttgtttaactcatccatgataaaattatcaagttcatgagcagtaatattatattctttgtttcctgttgtcattgaaactacgttgtacacgttatcaaatttattaaagtaaatgccatattgtaataaacaccaatcattgacataaatatcagtaacatctaaatcattatgtttgcttgaagcttcgttatatgttctaacaactgtgtaatcttggtttagttcctctaaagttttatagtttttcataatttatcaatccttttcgtttattgtgttttctttatatttatatattaccatgtattttagtaagtgtcaacacttttcttaaacttttttaataagttttgttttattattattaagtgttagtttaacgcatttgtctgtaactgtaatttcctttacaccattattataaagactatgacaagctttattaatatgatagtataaatcatcacattcttccatatctgaccacagtctataatcatttgatatagaaccttgtgctttaattctgttataagttcctttaatgtaatataaatatttcatattatttaacctccgtatagtgtattacaaggctataaccttgctttgttggttcgtggtatgctcgtgtgataattacgttgttttctctctcgaattgttccatttcatagccgtagttcttatatggtttactgttagtaattagtgttttcataattaatcaattccttttctgtttgtttactacatctattatattacactatcttaatgatagtgtcaactattattttaactttttttctttaataatttctgcattctcattcactaggtataacgtattatctagctctataaataagtgtttgttcactaccttaacattaatgttaattggtaatctatttgaatgtgatacgctaaagactttcgtttctttaaatagttctaatgtttcataactaccatcaatgtaagctaaatatttaacttgataatgtgttgagtattttaagtcatttctatagtagttattgcttttgtaaccgtccatgtctaaaagttctattagtatatctccaatttgatttacgttcatatcttatcaattcctttcggtttgtttactacgcttattatattacagtatcttgtatttaatgtcaataggttatacgaaagtttttcaaaagaaatgatttcttactattatatagaagaaactagaaattacagcttaaattaattattataatcaatcgatttaattgtatacaatgcagtgtaaaaataaccatttaatttgattaaaggtattgcatttatatgtcagtctattaaaagaaataatgatatagaaacaataaaaaagttagaaaaagaattacaagaattatataaaagagttatagattaggctattaacctaatctttttttatgttgtttgaagcggttaatataaagggaaaacagcgcctgctacttaggaaaatcatagatttatacttatgatgtttataacagtaagagagcattaagcttataggtctatattcaacggtaatactttttaggtagtatttatcctataatatttacttgcttatataaggtagttaaataggcaatacaagcatatgaaaaagctagagtaaaacaaccctagctacttaatttgattcaaaatatccttaacagcttctaatgttaaatctgataacttaatattcttatcactattagtatcaataattacagtatagttatctacatcatactgtataactttaagtactgaataagtaactaactcgtattctgtatgtgtgtgatattctatcattgcgtaccctatacctaattcagttaagataggttctaatgtttttcttctctccataaaatctttaatagtatattgcataccgtctttacttaaaaatgcaggctcgtcattgtaaatataaaataaattctcaataagttctagtaaatcttcttctgttccctcacaaagacttactgtataaagtaattcatcgtataatttatcctttgcttcttgaatattcattgatattcctcctttatcctatcctaagtgtatcataagttttaggtaatgtaaagtattttattttaaccagtatctaacttatccgcttcattaatccaaccttaatttaatccctgatacttatcttttatcatacatacctgtaataattacttgtctgcagaaaaggtctaaagctttcatattcaatatattgtagtaacaaaacatacttagcaacttgtaacataactgtaatattattataatgctgttgtaactaaattctcatctaattctcataaacatatgttataatctaaacaacaattaattagttgttagtattttaatacgaataacttattacaggcgttaccttgttgtagcgtagcgtaaaacaacaaggtatacgctgttttgttcttatctttttaaaaagataagtcgtacggttagtacgaaatacaaatatataaataagtaataacaaatatttatacataactaacagataaatatacaaattattagattaactatgttgaaacgggcatactatgctcaaattgatatacaattattagccaagattaaatacaacataattactcagaatataaatataatataaaaaagaagcggtttaataccgcttctacttcttcaatatgatattataaatactgtttatcttctttaactaaccttaataaagcatactcattctcaatgacactataaccctataagatatcttgtaatattaatctagtccctacaggtgttagtgtacatactgatgttcattaaagtcagcctctctattatttaccaaatctttctttagcaatctttttcatttgctctttgcgctcattacttaccggttttcttaatgtaattaaatcctcatctaatacaactttaaccaatactggtgtttcattttctaattgttctaatacttccaccttatcagggtactttttcataatatcggtaatataaggtttcctacttgcataaataatccattgcccttgattatagttcatacttacttcttgttcttcaaaactatatcctctacttacaactttagtcattctaataccctcctttatatttaagacccttaagctagggacgttatagttctatattaaacgataatcattttctagtagtatttatcctataaaataacttaatctttaagagcctaataaccgttataataaattagtgattaacctaactgtttctaaggtaatagggttgcttttactgtctacataagacagttcactatcgaaaccagagccacttaaatagatttgattacgttccacattaaatacaattaatttagtagggtctactttactaaacactactacatattccttgccattggctaaaggaagaatagctccgcctgttattttttgaatttttttgattacaacagaatcgtcttccatcatagtttcttctttgttcataccttcttgtactatttttctttttattgttttcattgttatttctccttatccataaatacagtaactacaatgttttgtaaacacttaataatcttatctctttgagtgtcagatacttcatacaagtcttctgtattatctaagaagcggttaaattcatcttgattagtaaaatctacacctttattagtctcatctaaaaatttctcaataactctttttactatttttttattactactcattatctattctccttttattttttagtaactgtataatactcgtcattagtaagtttactaatatctatatcttcttcagaaaaatatagatttttatcatctttacttaattgttttaatacactatcaatgtatataggtaataccttcccatcattaaaaaccacatcaatactatcttttaagtatatatgattctcatctatgattgtataaatattataatcttctaataccttactaccaattaacgctacttttccgttactcatattaagcactccttttatataatatttgaagtggttatacttcattcatagggtattccagataatacttaattgtttgtaaaggtttatgtacattagtgccataaccataggaataaattccataagtatcagagtaaaatttctttatatcaattaactcaacttctctatatactacaacattatatggagatactacaaactcataatctcctcccataaaagtattatatagtacttgttttaactcaagaccactagtgactatatccttatagaagaagttgagatagttatctactgtattaagaaagtcttttacacctgtatactctttataaatattaatccaacctaattctaattcataatataggttaccctcttcatcaaaacttagtttaagtttaaccgtatcaatatctttacgatgtatattaaaagattgctctaagaaacctacatcccaaatatgcttaactccattaaaattctttaaacctttgatacttaactgagcaatagctttggacattaacttttcttctttggtatttaacttatgtcttgataagtattcataaccattaaagtcatatacatattggttatcatctttacctacgctaattgactttaaatattttttattagtttctacatagtataaaacaccaccaagaccaaataatcctaaaaaaccaccaatataatcaacagagtaaccttgtttcttatactctttaatttcttttctcttactaaacactatagcactcccttatacattattctacttgctcttccatagattgaattgtatgtagtaccatagtagctaaatctctaattatctcaagttcatcactatcttcatatacattagttaaagtatcacagaaagagcatgaaccgtaaaaatcactaacagtgatatctggaacaccctctacctttgatttaaatttagatataatagtacctgagtaaccatcaccatcattaataacaatagggtttgtgtcatgtgtatctttcaacactaactcccctgctaacttgtgtaagtcttcatagaaataatgctcatgttcatcaataaattccataatataatctgtagttatgcctttagcttgttctaacattatattttcctccttatttttacaattattttaaattatctatcgtactcttaatcaaatatccttctggattaaaaatctcttgaatagcaataggcaagcctattaatagcactaaaaaagaaataatagacagagtaacagcaaatataattactgtgcatcctgcagcagaaagctctttttcattcttataaacaaactcaaataatagggtactatgaccttcattagactttttatctgacttatacaaagacacccataagatagctgttatagataataatatacttattgaacataaatctataataccttgagtaactgtgtatttaattaaggattcataaccatgtgtacctgcttgctctaacttaccacctaaactatctaaacgttctaatacttctttattcatatccatattatattcactcctttaatctttatatactaagtataaaccttaacacacataaaatcaacacatttatgtaagagatataaaaaaatacctatagttataatagctataggtataaattttcatatagaagcggttatatataatactctacttacctaggaacgtacgaatttcctttagacgctctttttcttttctgcacttttcatctaaagattcctcatagtaatcaataagactatagatactactgaatcctttaggtagtaatgtgtcactgttaataacctcttttactactctaccatttttgataaacttcatgttattataatgtttatcatcattaactttaatacagtaaccttcacctaagtcataagtataccaatccccactaccaaagttacaatgacctaatatatactcaaataattcacttaccataatatccattattctaacctcccatactcatacataactttattttcatattctgtatataaataccctagtaatatatagatattagtatacaaaccttctagctcctctaagtctttaattgttcccacctcaagcgtatcactcaaaggaaatactatattatccgcttcctcaaacctagcaatgatatggttgtctttatatacaagaatataaataaggctattacctactctacaccttactttataacccctacctaagtacacctcataatctgtaatattctccattatgccagtaacttctccatacttcctacaaaacttagctaattttgacatagtaaccaactccttttttaccttttaaacttttcttctagggaaaacctatctaattttacctaaatgtcaaccatagaatgcgggttcaagccctatttttacctttgactactttttcctagagaaaaactttagttatactgttctacttgttcttcaaatatattatacatatatttttgataagcactatcttttaaatacttatcatactcatctactagtatcttatacatattactaactacatctttcaataaggaaacatacaccttacctgtaccttgtactactacttcatactcactcatatcatcatataccataatagcacaaccaaaataagtatcttccagaaagaacctataaatatacttatcatcacttgttcttatacaatttgtatacttaaactcacctatacctgatttattatgtaacactctatctagtatatctaattcttccataataagcccctttctattgtgttaataaaacacctactccatatataaacataatcaatataagtatagttaaaaacactgctaacttaaatctattactattaccttctttactatatactctataacatatatctatatctataactaaatacattaatgataaacttactacaaagtaacctatactaataccctctttctattacatacctaacatatgtagtattatagaagcaaaaactaaaacagttaaaacaaaagaaacaataagatatatactaaaaaacacttctttctgcttaatagatttaactatatcagtaattaaagcactaagcataccaactataatactaatacctaaaatactaaccgcaatatacattaaagttgaactcatcatctacaactctcctatataataaagtactctacttactatgtaacctaaactcaaaacaatagaaatagtaccaatacaaatactcataaataataaaccaaacacacaagctgattctaaatcactaacactatcataattattaagtacatgcttataatacttcttaccaaaccttatacttagtacaataccaatagtagctaaaaatatagcaacgatacttataaatatactcataaactaatccccctttttattgaagcggtttttatttccattacttaccttacaaaaaccgcttcctaaataccaaataaagctaatatacttgataccagtacaaccgtcataactgtaaatgatacgatattagtccacttatcaaacctatcatacttaattgactgaaccatttctactagaataaaggtatacataaacaaaaccattacagctactattgtaagtaacattgttagtcctatcatatctatctctccttcctatcagacatatgatgtaatacagagagtataaaagcaagtacaaaaggaattaaacatgtaataggaattacctcttcccctatgattaaattccctacccacatacctaaaattactcctgctaaacaaaatatataacgtaaaataaactccaatgctttactcaacttacttcctcctttataattattctcaagtataacttaacaaaatactactttaataacctttgtttaaagaatcttactacgtcttcaccataatatacagataaaaatacattatcccctgtaaccctaaaaccactatctatacatctattttcgatgtaatagtcattaacttttaatgtactcatgtcccctaaaacttctattttatatcctaactgatttaaatgtacataaatatctgataaactcataatacaactcctcgttactaagtctttattgaagcggttatttaacccctctatatactagtactacacataataatacaagtgctgtacatatgtaagtatactgaatattactatataccaaatcacaatacgttaccttctttccatatagtaactaactcattatctacaacagtactaacagacaataaccatgtatttttaccttcgacatagtagtcaataacttcattaatactacttctataccataatgagtttaatacactgttaccttgcttataagtaactactatactacttaactcagtagaagcatctataaccgcttctacaataaacttagtgtcattaggtatagtaatagatttattaggatacaatgcattataaaacgatatatcatcaacagttataacaacaataaactgactatcagtagaatagtgtcgacctttttttatatcacctttataatacatatacattaattctataaacgaaacttctcttttaatcttcataataaatcatctcctttaactttatatacttagtataaaccataagtaatatactgtcaacacatatgtgtaaaatagttaaaatttctttattgttcggaaattactaaatatattaaacttttactctagggaaaattaagtcaatactaccatagaaacaaactatatatatatatattaaataagtaatgttcagaattatagtataccatatacacaatatctaatactaaatatacctttatacacagtaaatactacttcagcttagtttaactatacattagaatagtttagcatataatcagcatagtttaatactacataagcatagttcacagtagttaaaactatataaaaataaatagttagatgtctaatagttagatacctaactatatatacactatgaaggtgggaagcaaagaaattcctaggtaactgttttcttttacctatctaaatatgtattaagtaaggtgctgatgaaaaatatgaaatctttttatccgaatcaggtattgatgagttgaacagtatcaaagtgggaacaggtcataggagttagtacataggttaataaaacctagggtaagtattacttctaaccgtattatatataaagtaagagtagtaaagaaattcccatgtagctgtttttcttttatctattactcacctatctattactcacctatctattacttacctacgtactatcaactgtagttgtttttaactaagtgatatcagtgataatgatagctgtttttgttacttacttacctactacttatctatgtactagcaattattgtttctttatctattacttatctatctaaggggtgtaaagaaattcccaggtaaatgatacttaaataatacattacacaacttagatttactaactgacaatactgttttattttaactgtttttacctaagtgatagtggtagctactttcttttagttactttcttttagctactttcttttagttacttacctattacttaatatctattacttactattagaatatttattaatacttaagttacttaataattctttcttcttattattcatatcttcaaactgttatatagtatttatctatttagctattacttatacactacctactgcttatttatgtgctatcaattattgttttttatctattatttatttccttgatatataggtacttataatatcagttgtttctttgtgtgttacttatctgatttctttatctacttatatatattgctttcttttacctattacttacttatataacttctacctacatcaatctctatacctatttgtttgtctgtttggttgtttactcttctacacttacctatatacatgtctatatcttttaattacttctttactatctatattagagtatttaaatgttctttgtaggttacttaatatatgtttaaaggtagattttctagcatcaatctctatatattgtatactattttctttacaatattctctcttttctatgtctgataattttgttttctggtggttcatgtatccactgacttcttggtaatgttgaacaccgtgtacttctataacggtattatacttaggtaagaaaaaatcaaatctttttttacctaattctttaaatttatattctctaatatactctatgtttgcaatatctaaataactttgtgttaatctttctccgaagctagagtattgtttagagcattgacagctatagttatctttaattaaatctgtaattctaatatctttttttcttttacaattaggacaaatcgtttctatctttttcttagttgtatacttatatttaaataagtctttatatttaacatacttatgaatatgtttcttatggtataacatcttagattgaggaatagtaccatatggtatatagttatcagttttatattttagtaaattttgtttacttactttaacatagacttcttcctttatgttatatacataaagttgtgtacctaaatgagtgtctactacttttagtacttcgcaatttttaataatatctccttgttttatattatgaacagtataagacttctgaccttgggtaataaagttgaatttaaccttatagacattagctacttgggtagcttgtgttttattgttgtaagttatttctactctagattcttttttagttggtgtaagttatttctactctagattcttttttagttggtgtaagttatttaatatagagcttacctttcgtgctatgatactcaaagggtatataatggtttacatttacccaatcaatacgagacttctttttaggtaaggaagataagtctatatagcttataacaccttgttttgtttttgaataatatatgtcttgttttttccagtactccataataagtgctcctcttactctttattgaacctgttctcctgtatcttgattaaacactttagcatttgggttatgtgtttcaccttcttgatactctataccccataatcttttacgttcttcactaacgtctttatgctctccgttattctcaggtacgtatgaagtatggtcatctgcatcattattttgagattcttggttactttgttctacttgctcttggttgttagattcttggttactttgttctacttgctcttggtttttcaacacattgattattgttagtacaattaatacggataaaactaaacttaatatttttttcatgattaatgtctcctctataattatttaacttatatacttattataaaccttacacttattcatgtcaacacttatatatgaaaaaagtaggatattttatcctacttattacttactaagaaatactcatacttaaattattatagctggtttttaaagaactgataagctagtacaatgttggtacgctctttattatctccttcattcatttctaatcctttttttagaaattcttctaaatttccttcccaacatcctacaaatactttattatatttaggtaggtacgttactttatttttaaaactaccaatattatctatagaatacatttctaaacctctaataccttgagtacttgcccaagacagctcagcacctgttaaatcaacatagcttaagttaacatctaataaattagcagaccttaaatcagcgtttgttaaattaatacctgataagaaggcacgctttaagtcagcctctattaaagtagcatttgttaaatcactatctaataaatcaacacctgttaagttagcttcttctaaagaagcatatcttaagctagaacttaatatatcagcatagtttaaatccgcatatgctaagatagcttctgttaaattaacttctattagtttagcacaacttaaatcagcacctattaaggtagcttctcttaaatcaacaccctttaaatctaggtcacgtaagatagtaaaacttaaatctgctcttttaccttcttcctcattgctttctatccataacttatgttcttctagaattttatttaattcttcctttgttattgttttcataattctcctcctctattaaaataatcatcatttctccatacattaataaaggtaccatcgattaagatactgatagttaataattcatctccgtatatttctatacaatcattaatactcacattacctgtgttatccatgaatagttcttttgcatgactatttaataatacccagcagttttctagttttgtgtcattagtaatttcttcttctactataaaactagcgtccaaaggtacttgatatccaatagtcatacggttattttctaacagaaggtaataagtatctaagccatcggatgtacctgtgtaagtaccttcttttaaataaccattaaagtatttttctattaattctttacaagtatatgtcttttgaattatcattattctcccaccttataaaatttatttagaataagatacaactcttttaatgtctctcttttctctttgttttcgataggtaaatctaaaaagtctttaatcattctatgtgcatttacatatgatacatcatcaatatctttattcaacaccctgtttgcttcattatataattgttctaattgtttattattcattttgtttatctcctttaactttgtatactaagtataacccacacttataacaatgtcaacacttatttataaaaaaagtagggaatttccctaccttccacctttactcaatagttccaatacatacttttgattcaggtaataaatcttctggaatgtcttctactaaaactacattacttacaatattacctacttcacttaaagtaaaaacatctgcctcaaccaacccataaaagtctataatatgttgtttatatttatgattacatactactaaaggtacattgtactcaaacgctaagagtttaatagtaaatgaattaatactatttttatcagtctctatttgtaaaagagattcatatgattctacctctaaatcatatgtgtctacttctcgtgaacttaacactaaagattctctcttttttttaatgcctctagaaaagtgtcataatagtactttgataactctttatctctttctagtatacgttttagcatactaattgctttatttctaccttgttcaacttcattataataaatatctgccaaatattctctatctatgttaatatcccattctctttcaataatatttataattttacctaaatttttcattattcatacccctttttttttaaaataccacagtattattattcaatgtttcctctactatttcctgtatatcaattgctttttgcacatacctgtttgttagtagcatatcatctctatataccttaacattagatacatcatcacttactacaaattcgtatttacttgttttagtagcagtaattttaaaataaggtttaatatctacctttaatttatacccattaatagttcttacttcttttacccagtcatataaatcaattctaacaaatctacagtaagcttcatacttatcacaaaaatcttctagtgtactaaagtcttgtacataaccattctttgtaattttagcagttaagtcaccataaatatatattgtaatataacctaacacatattcattcctatgattaagcaactcatttttaaacgtatgcttagctgtgacaggtactttattaagtatatcttttaatttatttacttcatcttgttttaataagatactcgactcatatgttacattatcaataatgtattggtatttggtattttgtattagaatcgtagatgtattcatacgtatctttatacactaccttttttaagtacttatcgttaacatgtaagataattttgtcttcattactagaagagtcaatagttacagtagagacagtatactctttctttatgttttcaattacctcttctactttagtttgaataatgtgttcagtaggtgttatatacttttcatagtactcagaagccatgtctttagtatattgactatagttaatatctgcgtcttctttacgtttttttgctttgcttaaatctggtataacaataattagtacacttagcaatataatacctaaaacaattaaaaatgtaatcaccatacctaccattccccttcctcctctatatctctttttattgcatattcaattaaatcttctttgtcatatggtatcatataccaactaccataactataaatcattatacctagttcagtaagctcataatgtgtcctatttaatacgcataaaaagtcagcacctgactcaccatctacagtatctaaccaacaaatatatggtaatctatccataacattaagtatatgtttatgttcgtctgaattaaattttatcaatttctttcactcctttaaagaaatcgtaagctaatttaattttctttgagacttcttttattctatcttcttcgtactcaagtgtaggttctagtttaccaaactcttcaagggtatattcattataattactaataattctatcataatcaggtaaataagttacatgctcgtcaaaatcaagtacattacttatagtatatatacttattccaaatacgtcaagagtattagcataatataatgttgtattagttaggtttgtaccaccgaaatctgcaccttttaaattagccttacttaagttagcatttttcatattagcccacctagcgtctgcttcacttacattagcttcagctaagcaggcattttctaagtttgcttttactaaattagcccactctaagttagtatgatgcaactcaatatccttcattctagcatgtgtaaatctcgtagatatacactcattgtaacttaaatcagaataacttaaatcacaataacttaggttagcatcacttaaactagacattacaatagttgaatattgaaggtcagcggaatgaaagtcaagatttcttaaatctacacactgtaaaaaaagcttttctccttccttttcatttgtagctagccattgttcatgcttttctatcaataaatctaattcaggttgtgttatcctttttaagtcttgcattattccacgtcctttaatacaatttgctctatattaaatctattaaatccatatacataagcttttaaatcgtcaatatcaattttacttttaggtaaacaaataacatcatagtctgcctcaataattactttagtacttgtaactgttataattatttctttatcttgatttatataatcttcaattaaatcttttaaacacattattatcagtcctttaatcttttatgaatgtcttttaattctacataatacttatgtgctgttttctttacaccttctatactatttaatagtaaagatttatttctttcaagttcaacaatatttttgttaattatatcttttgtcttagggtttcttgttttaatcatgctgatatgtgcttcatggatactaatatctattctatctaatttagtaaatagaggtgtaacagttctttttagcttacctttaatatacgtatctatttgttctcttgcttcttttataccttcccaattatcatcttcagtatctataactgtaataatagttagatgcttatcaataacaattctataatttttaaatacatatacttcattaccgcctttttgtgtatgttcaaaagtagcttgcattaaagcactagcaaaccactgacaagcacgttctttactatcgttactaactcttaaagtataacgttcatacgcatgtttagttaggttaatatgcttactctttatgggttttcgttgttctacaatgttcataattaatcatccttatatctatttacgtttactaaaaaagcagtaagcatctcttatttcctcaagtttactattatttccttcattcatctctaatcccttttctaaaaacgcttctaaactacctatccaacaccctgcgtatactctatctaagctaggaatataagtcactttaccattaaaagttccaatattatctatagagtatacttttagtcctttgatattttgagtacttgcttgggataatttagcatctgttaaattggtatttgttaagtctgcatattctaaattagcctcatttaatctggaatctgttaaattagcttttcttaaatcagcataatataaatcagttccatataaaacagaaccttctaagttagcatcatctaaatcaacacagcttaagttagcacgtgttaagttagctcttgttaaatccgcaccttttaagatagcacctcttaaattagtatcctctaaatcagcataccttaagacagcacctcttaaattagcactccttaagtcagcatctactaaattagcatttcttaagatagtataacttaaatctgctttagctccttcttcactattactatctaaccataatttatgctcttctaaaactttatgtagttcttcttttgttattgttttcattgttattctcctataccctttattaatttgcttgtactccagcctcagccttttcttgttgcgagcgttgtaaccattgctcaaagctctcattagcacctgcataattccatgaggctcctccgcctccaccgccactagctttatctacttcagttctgttttctaattctgcttgtgcttgttgagcttctctatactgattgtatttgtccgcatactcagcattagatagtccattatgttcacttctgcttgcctcttgcatttgttcgttctgttgtgcttggttaccttgtacttggttatcttgttggttattttgaacagtgttgtcttcttgaatttgtttattttcttgttcttctactttagatgaatcatctttcttattttctttcttattttctttcttattttctttcttatcttctttataatcatgtgttggtgtatcttcttgtgagtagtaagcacaacctcctaataatagtgtagtgctaaagaatactcctgttaaaattttatataagtttttcatatttatcaatctcctttttctttgttaagttaattatacaacttgttatttagtaagtcaacatttattttttcttttttgtcattttattttgatactcttttaattgtgttctttgttctggcgttagcatgttatacatctccttttaaaattaattctaaatacttaaataataaatctaatgactcagtactttttaaacttttcatattagtaagttctaaaccttttttagttcttatatacacttttctatttgtaaagtcttttatactataatctacaagactaaccgatgtatttaagttatgttgtgtatttagattatcactaatcaattccaacgtcaagcgtttttgtttatttaaatttttcatttttactgtcctctctgtaatttataatacgtatacatatctttacatactagtttagcaaaataatttatcatgtattgtgctgtcgtttttttaattctatcataatgaaagtcaataataggagttgctacactaaacctacctatataattaccgttatctctaacttcaaatactaatgtatcttctttccagttaataatcttaaatgtttctgtggtacttaattcttttggaaaagaccaccactctttgtaagttgctaatatttctatagcattagatagctgtctatgaactttttctttacacataaaaaatcacctctaacgttttgttactcttagtataaagcaacatgttaaaggtgtcaacacttatttttgattttataaatctttatttgattctgatattgtaaactgtaaactttttgctaaatgaccaagtgcaatacgttcaggcacttttaaacctaccttatcaaaataggtgtatactaatcctccctcaacaattaacataataataccatctacaacacataaatacttattttcttttgtaactagttttacttctttatttaataaattacttgctaattcttgaatactaaccaagatactatgtgtaatatggattaaatttctatatttttctgtatacatactaaccaccctttagaatataatatttgttatgcctttattatataaatctttagtaaacttgtcaagcgcaatacgtgctacttttaattcttgcataaaactttctacttcactagcatttacatatgtacatggtatttttaattccaagagtaacttttctgtagtataccctataatttcaggggtatatttgtttactgattttttaaaagatgatacttcatacttaccttcattatctatgacacaaatataatatcctctacattcattctcatatactacttccatttagtaacctcctatcaaatactttatcattatataactaagtataaaaggtactaatactagagtagcccaaactaacgtaataataacttgatgaatcaaataaggtaataaacctttaacccatcccttacgaacataatacttaataactatatcagatattaaagaagttaatttccagacttcccataagtaccaaataaatacacctacataaaacaataaaataaaacctaacatgagtttatctactatatccatttatatcacctacctatatccttttgtagcaaggtctacaattttatgttgcaagaacttgtaattatctttaaatatttttaattcatctttaccaaatgtatgtttaatttctttcttaactgtccatgtagttttaccttctaatactttacttagtacatctaaaccaattggaattatacgctcatcaggtaaaacaccgttcttaatacttacgaccacaatatgcaaattatctaaatcactttttttcatcatttatcatctccttatatttaaactataacacagcataaaaaaagagtcaagcataaacttgactcaatccttgttaaataaataatatataatagcaaaacatactagtataattactactgtcatagactatcatacctttactttttatttagtactgcttcaaacctatacttatgtactggattattgtcattatcctccgtatacacacgaataagtttaaagtttacaccttctctaaatttactagtcctataatatctcatatcaatacttttatcacttgttcttcctggtaaataggtaggtagtttttccataaagtatgctttgttgtctactactttcttaagcgtgtaatctcctacgtactctacattcttatctttttttagtttaccatgatgtgttaattggtctgtaacttgtgatttggttttttcatgatataagtatgaggacacgtaataagtagatatagataaagctaacataactaagataattacataagcaattattgcttttttactcatagcgcaccatcctttactacttataatataataacttagtctataactttaatacattttaacagtaaaggacaatatatcattctattgtctccgacaagttcttttagtttaagaaaatgttttaaataatagtcaggattttttaactcataatactttagtagtgcttcttccatactactatcaaagtagtgcttatcaacaatttctaaatgtgtaataagattatttgacattaaacttaatttatctttaatctttacatcactaatacttgtacctactttaatgtcattaatcatatcagcctgagtataatctatatcagtattttctatcttaattagtggttgcataacatgcgctttctcatacacactcctaggaacttgacctattagatggtcgaaagcagggtcttcagatacataccctacatctatacctatatactgaccactttctatatggtcggagttataatcttctggtattgtacataggtataaattactttcattaatctctttactagaagtatcaaaatcaggtactaagtcttgtaaagattctttgttaaataaactattttctattccttgtatagttaaattattatcaatgctctttacattatacaagtaatctacaattcgttctttgcgcatatgacacctcttattctacctcgatagtatcttctaaggctttctcttttaaatctgattttctttcaatattatacaaatctaaaatataatataaaccattcttatgaatgttatactttttatagatactttgtaaatccatatattgataatctttaattaaggcttgtactttattcttatcattagtaatatgttttacacgttttgctactctagatttcttatgtttcttaggtactttatagaagtttaacactgtataaatcaaacccatacttactttagcttccttagcaatatcagtcacaggtacacctttattataacttgtaacaatatattcttcttttggtgtattgaactctttattcttacttaatggcgtatagttgcttttattttctaataatgctttctcttcttcatttaatgtaataatcataatcaattgctccttttattgtttgtaataaaagaataacacacccatatgagtgtgtcaatcattaatttttaattttattaagtttatcttcattatataaagatgtttctcctgaaagtgcatagaaataattacctttactatctactaaaatatctttaaccttagctacatctgattcttgattatctcttacatattctacaattgtgttcttagggaacttaacttttgtagattctacataatcgtcttctaaataaacatcaaaagttagtaaagaattaatagatacattatacagtacccaataccttttatagaacatggtttctttatctaagtctcttgacacttcagtaaacttatgttttccagtacttagtctaagtaatatatctccttggttctcttgtttaactctaagtacatcacctttatgtaggtgtgttataatatctactatatctgtaagtggtttaacatcttttattggaattaaactaatttcttctgtcatatgtattacctcattatctatattgtatagcctactctatctaatgtatcttttaactttcttccttcttcatctaaatctaagtttttatagaactcttcttgtaattgctccattctttgaagaacttcttcatgtttatcttcaggaataaactcaagcataacttctgtcatagcagtatcttgtgcttgttgtttaatcattagttctcttagtcctatgaatgacataccttttagttggttacccgtaattctatcttttgtttccatagctttaatcattaaagcagggtctaatgtttctacaaagtttaaacctttagcacctttttgaataatcatatctagtatttgaatatcatcatatattgtttgtacattctgtgtagccagttcaaaaggtgtataattttcactatctaattctttcatagggttttcttttttttgtatctgagtagcactaactttctttcttttatcaataagttcacctaagtcccatccattttcaatagcttctttacgtttactcttatatcttgtaatagcagatttggataactctaagtcatactctttacataggtctataatatcatcatagctaacatcttcatctatagcattatccactttagaccttaatagtttattattatataatttagatagaatactttccttatctggaactacctttatatcagattttttatttcttaaattcttttttctagccattatatgttcccttcttgtctcaagtgtctttacatatgtgtgaactaaaataaggagtatgtatatttacataaccttatcaaatcaactgttttatactttacactatataatatatcacaatttctgcacctattttattttcataatagatactctaattttttacactacattgtaaatattttaagcaatataaatcttttttctaaaaccctatacctaaaaggtattttaatgttttataaatataattttaaaataagaataataccttttaaaaattaactaactacttgaaaaaatatgtataaaaaatcccttatatacgtatatttataccttagtatacatatttaagggagtattatactataagagaattgttagctcatcattactaacaagattaacaaccatcttatagttattatcactaactttctctaccttactactaacaatatctttatatctaacttttacataggattgaccacaagcaataattaagtctttatcatcatctaaaaagaaaataccggtctcatatgtattatataaactataatgatatttattcgtatctaacttaacagaaaacacacttctatttattaaattattacccttaaagaatgtaagaacttttatggtatctaacttattcagtataccctgattacacaatgtccctataaaagattgaccatcatattgcttatcagttactagtaagtatacaacatgtgtgtaatcatttaaaggagatacatcttcgatagtgtataatctaagttttaattctttattaatagtagtatcttggtacataatagtaggttcaataaaagttgatacaatgtctactttctttgttgaagttaattctgttcctttagataataaatctgtcattaatccagtattttctaatcttttatttaactgctctgttttaacataacctagtcctgaatcacttatcatattattcatacctacaatagcaggttttaagttctcagtaactattactttattcgtaaattctataccatcttctacttgtgatatatcctctaaataaggtattattgttacaccgctagggaaataatcactatcataggatactcctaacagtgtaatatctttactttgtagtttcttaaataaagtacttacatttgtttttttagcttttgttcttaagtatttaaccattatttaccacctttatatatcattttctttggtgttcttttcttatctaatctactatttttgcgtacagatattctatgtctagtactaaaaatgtagattaaatgtgtacctctaaatgtacgttgttcacgaatgctacatttacctattaatttcttacctctataaacataataaactctatccgtatgtagaatagtttgtgttaatttacctttttgcttcattacaagatatttcttctttatattcacagcttcactaattaagtctaacgcatacttcttttgtattttaatgtctgtagcagtaacattatcaaaccttttaacaaacaaaggtttgtatttaacaacaatactttcatctggtatatcttttctttttttattaaaaaaagaagtacttctacctgataagttacctgtaggagcaaagttaacaggttgatgtttatatccgttagatttaggtttaaatgtatcaggtttcctctttgccatataataccctcactccgttctgtataactttaaagaaatcatcttctaatatctgccatctattactataaccatagataacacctctagtaaatatcttataagagttctctacacctaaataatgaataacttggttaataatagctgactttttcattctcatacgttgtgttccttctatataactgccttcattgttagtatttttaccgtgctccctatagttatatccagttaggtatgtattataatctcttaactgtttaagtatagtcattaaatgttgcttccataaaatatttaatgtatgataaggacttcttagtggtgatggtgtagcttctttatacttacctactacaggactacccttgaagttaatatagctcataatacctacatgatggtgtttatacctttttagtatttgctctactttaggtacatgcttatcatgacacatcacataaacatacttacatactagactataatagtataactgtttattaagtctttgtgtagagtctcgttctgtttttatctctatacccataacagtaccatttctatcaagaattaaacagtcagttctacatttaccttgacaaatagctttttcattaaatattctaatatcttgtatattacttgttatctcatcatctttaaacatatgtctcttagttctaattaaatctttaatgtcctgctcatagaatttagttatctcagacatttattctatcccctttaatacgttgataatattgtaatatactgtctaaaggagtataggacttaatccatttaatattagataaacatataaatactcctgtatattcaccatgtataactttagtgccttctttttgtgtaatagttactctatctttttctctttcgaaaaaccctttacctacagcacctgtagttgtatctgtacctaaaggtataatattagctaaaaagataggaggttcatatacctttttatacttcttattattaggtagcattgacttaattgtattacttaatatcgtaccacctctaatagttttacttactgtttctattttatatttcttttgtggtacttcatcatcaacactatgtatgttatatactaatacatactcagaagtttcatcttggacatgttctatatagtaataaggaacacctctaaaagagtaaacaccttcacttacttttgtcttaataatttcattatcaaatttaccaaaatttaattgcaacaaaaatcacctcatatctaatataccacaaataataaaaggagtcaagtataaactggactcccttctttactattctttattttttgttacgaaactcaatactaataatactaacgctgttaacaatacatctattacaataagagcaataatagcaaaaagaacttctatccttgttgtaattttataaatcgaatctccaaaataaacaacaatacctaagaggataataccacataaattaggtaatagcacattatagtactgccaattgggtagagggttacctcctttttttactaaatcacgctcaccacgtaacatacctacaaagttcattgtggtattaacaataataatgataagcaatgttaaagctataattgatagagtgtccatattatctctccctaatctaagaatacagttttaatgtcaatgtctttattttttttatttaaaaatagtagttgttgtgatggttttgttctagataaatgtagttctttagcataattattatatcccataggactacttgctacaatatgcattctattgtaatcttcttgtgttactgagaagtggtgtacatgacctgtaattaacaaatcaatgtgagtgttctcaataaatttaggaatatgcttacctttacctttaagtccatctccatggtttataataatatttaagttacatactgtgtctttaatagtatatacatcttttctattgtcgataatctcaataccttctaatacaccgttttcttttaacagcagtaaagaatccaatacaatataagctacactatcattgtatactttttggttcttattaccctgtacacggtcgtggttacctgctatcatgccgaaacgtaaattaccccatacatatggagataattctgttaagaagtcaattaatagtctagttccttttgctacctgctctgccatagtgaactcagtatcaaaagcttggttaacatctctcatattaatatgctctattaaatcacctacaaagtatactgtaacattactaataccacgtttactaatatccttaatagtttcctgtagtagctgatttaatcttctttttagtacctcaaagttatactcattagttaaatcttgaaaagaacaacctacatggaagtccgacagtaagataaccagctcttcttcttcctcagtagaagcatacttacttactttatggtctagtaacttattccctttgagctcattaaccatagtacgctttaattcatcaaacaaaatagtagggtatgcagtttgtctattaatctttcgtaattcccttagtctagatagttctttttcatgggctactacataagatgatacttcttcatgataatcattaccctcaaatacttgtttatcttctacatctcttaagtcctctaataacacttcacctttaactgctttatttttcaagtcatttaagtatgtgtctttcctaatattatctacaatatcttttaattcattgcgatttactctatcaataccaaaacttgctaatactttattaaatttagaggtaactactttaccttcatctttaagaaacacacctacaataactgcttgtaactcttctactgttttataattactcataaatacttccttccgttattaaatacttattcatattctcacctaacacatgaatatggctatcaataaatatactaaatatgttagaattttcattataagatgctccgaatgttttagcaacactattaacatcataaccttttacatagaaagtaaggatatcactagtacctcttgtttgtgaacctataacaacaatacctttttctttatccttaagacattcatatgctaaaggtaatttatactcaggtgctacttcatatagtacatacaaatcatttacgttgtaaaacttgtcaaccataataggtaatactatatctgcagggtaacctactagacccctttcttttgcttcctcataagtagatttaaagctaaacaactcagtatacttatgagcaatgtcttttggataactactgaaattaatatttaaacctctatcatctagaaccacaagttgctctaataaggacaggtactttaaatcatcacctactgtaataaaatctttgttatcaggtaagtttatattagaaacaaagtataattttgtaccttttaataattctttatattttaagtaatcctcattattgtatataaaacctaaaaaaataacagaatcatacgtattatcactagctaaatgtaatgccgagtcaaaagatatcacactttcaacgtcgaacatatctataccttcggataaatgttctgtatgtgaagctacttcatttaaaataaataacatcaatcctcaatcctttctattaaataccctaccttttcattttccttatcattattagataatccatactcaacaattttatacctatacatatgcactaggtctttaataacattaataaccataatgatattgaccttacttactgatttattatcatacgcaactgcaatatacttttccttattttccattaattttttaactttcaaatggtcgttatctgaagttaagtgtactgttttaatatccatatagtacctcctttattaattcttgtttaactatagcatataaataaatataagtcaataaaaaaaagcccaacaattaagttggactttaatttattatagctcactatgtggtgctgtcttaaattcaggtacatctaccttttctgattcaccagactcattagagtatgctactttataagttcctttaggatacgtagtatctgctgttaaaccactaatagaaatagttgttttacctgttttttcagcagtcttagtacctactacttcaccatctttatatacttttagtgttttttccattgatttttacctccgattatgctgtaatatcagctgttgtttctttagggtctacagttacatctgtaggagcttcaggtactttatctttaacaactacagttacagtatctgtatgattaccatcatcagttgtaacagtgattgtagtctgaccttttgctttagcttctactaaacctttacttgatacactagcaacatcatcatgttctgaagtaaatgtataagtagcttttgttgcgttactaggttcaatcgtagctactaaattatgtgtttctcctacttttaaatctagtgtttctacatctaaagtaacggatgctactttaatgtccttagtcttaaacgcaggaacatctactttttctgattctcctgattcattagagaaagatactttatatgtaccttgtgggtagtctgtgttagcagttaagttatcaattgtaattgatgttttacctgcttgtttctcttcactttttaatagctggtcacctttatataaatttaatttatccaaactaagtcatcctttatataattattcagctgtaatatcagctgttgtttctttagctgttactgttacatttttaggtactgaaggttctgaagtatctccttgaccttctcctgagtctactcctttaacgtctttacgtagtggactagcaggaaactcagcgctcacgtcttcatgaggtttctcattactatctactacttttttagcatctttactttcagcatcaactaaagcaaaaacatccttcttgttattagcaaggaatacattgtatactccaaagctgaaacggtcttcaacgaatgctaaaaacgcttgaattaattgtttacctttatctttacctttaatattttcagttctaataaaagcatggttgtaagggtctttaacagtattaactacaaaatgaatttggtctccatctgtataagcaacaggagcatttttcataattttaatatttcctctaccatctgtttcaatcgggtataagaataattctcccttattatctactactttgtagttatactgaccacggtgtgtacgtgtataaccatcttgctctacttgaacttgtaaatacttatctgctacagtagtggtatcttgttttaatacttcattaatatttttcttagccataataattaagctccaatcattattttttacattataacatagaaaaaacctccctatgttattatttttttcactaataatataacaaaagggaggcttattcaggttattcccacatatgattttgcttatctactttattatctttgatataccttttggcattttgttcatgataagcattaattttaaatttaacataatctttaagttctgtaagctctctagctacttctgaacgttctacctctaacctattagctacagtagacacaataaatgcgttgtcttctttatccgtattaataaggagctcttttagcagttcactttgtacttcagtaaattgtgtatcatcaaagacataattaagtaattcattttcttctaatcccacatttaactcctgtgttaaggactctactgtataatatgttttacctacaagttcagtacgtttatatttattgttcttcttaacataactgttctgtactcgtagtgttagtttagttttaatataccctggaaaatctactttactttgtatatcatactccttaactaacttaataaactgctcatctatgtattcccgtagctcttgtttctcaaagtcatgactcatacctctagagtacctatgaaataatgaccatctaaggttcttatacctttttaaaagcatatctaagtctctaccaaagtcagtaggaataccatctaagtctataatatatctattcccattattaactttcttcataaggatgtgctccctcaaatacaatcttaatcctgtgtacatcatttgatacatagatatctgagtaatgtattgttttaggtactttgacttcagaaccattataacgtactaaagagtaacctcctgcccatcttgactctacatgctcaatatacataactgtagaatcagtgtaaggaaatcccgactcttctacaatgataggctccttattatctctagcttttttaaaacgttctgctatttcaatataaggtaagggcaatacatcatttgtattagccctacctaatgcttctttaacactattaatatttctatctattagattattcatttacatcttccttagtctctttattagtagagctaagctcttcgtagtaatcttgtaatgctttaaactcttctaattgagtagtgtctacttttgtattgtttaaaggtgcatacttatgagggaaattctcgtggtaaactctactaaataattctaagtataattcatggttgtccattaatgtcggtacccaatctttatcatattttttaatttcttcaccatttaacgtaacataattacgccatgttcctttagtaattaaaccacgctcaacggcttctttatagatagtatgataagggtcaacaccgtttaattgaatagtatcttcatcagaacctacttcataacctgataataaatcaacttccgctttttgaccaggtctagatagcttagacttcttagtctcaatacgcataacatgacctttatacgtaggtttacctgtcatagcatcattctgttttaattctgattctttacctttagatactttaatacgtaaactagcaccatgttcaaaagctcttcctcctgtagacttaatagggtcatcataaggattactcatatttaaattatcacgtgcttggttaataacaattaatcctgtatttgtatcattaagcttaggtgaaatagcatttactactttttgtgtacttgtcgctttcgttccaagttttttatggtctactcctgcatcaatttcatcttgtgtacgtgtagctcctagggaatcccaaatgaacaaaataggtacgcctggtgctttctcattaaatgtatcaatccagtattctaactctttacctacggtttctactgatagttcagtaacatttttaagtctaccttcacctgactgtattgagaacaatttagatacgtctacacctaactgttccatacgttggttatccgctgttccttcaatgtcaatccaaactgtaataactcctaattgtgttgctactctagataagtgtactgcaaaagtcgatttcagttactacccctagtttcctagtactttaacactaacttaatagtgggcttagactatatctttaattgcctggtatgcaagtttttgttttcggtctatatgaatattattatctcgatataatgttttcattaattttttagcttttttacctgtataacctattctataagaggtagaagttttagatattgtaggacatttaaaacctaataagtcttcaatccaactacctacttcttttaaaaattcaggatgattgttaactaaagttattgaccatctattattataacatccaatagaaccatcaccatcaaacaatcctcttaagtaatgtttccttaaatcataaggtatgtcttgtgttaaccaatctgtttttttagttttcataggtattataccatatttagctaaatcattacatagtttttcatcggtaacactaaaagtatacgtagaattttcattttttatataatctctttttctatgagattcataaattttactgtctgaattcaattctttttgaactctttctactatttctttatcaattaactctagtgttaagtaacattgaccttctcttctatatctaacacaaccgtcagccatcaataaacctaaaatatatgctttctcttcagtatcaattacttcaaagaaatctttattaatatttctattaactctcctaggttgatagtaagatgtatcaataccaaagtctcttaatattttacttatctctcttgcatgtgttgtatagactgcttttatctctgcaatagtcatagactcctcagtgtacattcttaaaatatcttgtttttgtttactagtccatcttctcttgctatttgtgtcaatattaaactcatctagtacttttttaattgtaaagtaatgtgcattatactttttttgtatttcactaaatttcttaccttcttgaaaggatttcactatatcttgtttttcttcattagaccatactcgttttaccatattatactactctccattttaaatagatttcgtaggcaattcccacgtacttcggtttccctactctactcagttactcactaatacttctcaatattagctaccttttcgatagtcgttgaaccttctccattttacaggagcttggatgctgattacctacactatataatataacagtttaataactcgttataccatataactcatatacttgttatttttaacattcacgcttaccgtttccagttacgttgtagttaacaagtctttaaggcttcccagcaattcacgtggatttgtaataactcattataagccattgtggctatttaaggtaaccactaccagttaatccgtaaacttctgtaagtcttcctagaggaatacctccacctaaaattctatcatattgtggaatcatagtaggaatgatattcttaatatctgctctattactatctgatagtaaagttaaacctaattctttacctaagtcaatagtatttaaatttgtagtatctacttctttacctttttttgctctagccattatatcatccttttatatgaaatttaaataaaagagtgctaagatagcactctataaagttattataaatctaaacctgctaatacatcatctacactcttaggttgattttgtttagggggttctggtgttgattcatttgtgttgaacggaatttgagaatcatctatattgtttgcatcaaagttatcaaatggattactttgtgtttgtggttcttgttgtgtcggttgttgtacaagtgttccttgaccaaattgtgtgttttgttgtggtggtacctgtggtacaggttgttgtgcgttattaaagtttggttgtgtgttattttgcccgcctaaattatctggcaactgctgttctatgctttgttgcgtaggagcttgtgtttgctcttgtgttgatggttcttcacctaatgtgtttgtttctctattgaatttaaaattatcatgagaaacttctgtgttattaacattgttaatcaaccagtttacaaagttagggttattttcttctgttggtgtagctaacttatctaaatcagataactgctgttcccaaccttgaggtaaagcacctaattttactgtaggataaacagttacattccatgatttttcaccttttttagctttagcaatattaatagggaatgcatcatctgctgaaataaagctatgtgtagcagtaggtgatggtgataacattttatcttttaatcggtcaatcaattgagacagacccgtattagatagctccataggttgaataacaacattaccttgttcatctgtgttaggaactaattgaccgttttgattaaagtattcaataacatgaatatatgctcgtcgtgcaggtttattagggaagttactaaattgtacaccttgctttaaccatgtatttacataagggtctacaacagatgagttaactttctcgggtaaagtaagcatagagaacttttgtgctccgtcttttttaacatagttaatacctaatgttctaaattccttaaagaactcattagaaccttctacaggcggtagtacacgtacaagtgcagactctttattgatttggttaccgttagcatcttttactttacctaagcgcaaaacgagttgttttggcttgtataattctacctcattgtcaaaaccacttgattgtagcttttctgattgctgattaataaattgattaaaatccataatatcttttctccttttattttaaaaattacttaattagtataacatgttttcttttgtttgtcaatacctaatgtgtaaatgggttagtaacaccaccatttttatttgtttgtcttagttccgcactaatctgtactaacatagttgtacgtgtttcaaaagcttttacgatataatgtaattgtttttctctataattccatgcttctacaacctttgcttgctgttgatattcatcagaaagaaatacagcagactctacttggtcttttgtaggtttctttccctgtcgttcgtactgagctctaatttgtagattaagttgagctcctattttttctaacttacgttgctctgcttcggtataattactcacacgttcttttaatgaagcccaccatgcaaatttagacgactgttggtacatttcgtcttgaattgtatattcactaagttttagttcatcatggatattaaaagtctgagtgtttccattgttatcttttaaggttaactcattgaaatctaatgtatctaaatgtatctccataataccctcctctattttactgtactatataactttgaaactgtcaatattatttttaatatattccgttttttgtttgtactgctcttcagttagtttatctgattcatagtagtctttgatttgttgtaaggctaatttatacttaatatatcctttatacgaattaaattgctttattaactcttcgttgtattctaccatatcattatatgttaatcctatctctatatctgcatctataggatactgtcttaactcaccattaatttttatttttaagaaatcataaggaaggttctccattacatggacaataactttagccataatattaatttcttcaggaggtgagtctactacaatactatcatgaacagtagctactaacttcgatttcatattcttattttgaataaagtcgtcaatataagtaatagccatgttagtaaggtaaccacctgtaccttgaataatcgtgttaaaggactgtctaagaccctcatttttaatctttttatctctagattgtgctgagtgtatatatcttctgtgtccattcattgtttctacatatccatgtttttgaacaaactcatgagtttcatctatagacttcttaatagcaggtttattagaataaaacttattaaatatttcagtagcttcatcaactgtcatattatttttacctgcaaacgaaaactctgactccgtttataccctcggtttcccgatatttattaggggactagactatatcttaagtaaatacgttactatctacttctaggctattccatgtaggtatgagctacatgtactctactcggttatattgcaataagccctctcggcgtaaagctcaccttttgatagtcgttcgataaaataatttaagtgtttaagtgtaatcaaatcgttctcttttctctattttgaatgtaatcccataacaatcttcaccggtttccatttttctaaagttagtgcctgacgtaggtatatttagtctctttagtagcttagtttttactctatcataatcaatttccacatgattcttataagcaacatagtgaggtgcataaagtttagaagggttttctacaggttgataattatattcttgtagtgttttaaaaacccagttcttatgatgttttctttcccctctaagaactgcagaaatatggctttgaattaagttatgttccttagcaaatttagactgattgaagaatatatattctttacctgtagggtctatacctaatatctttttacttcttgaaggtacaaatcctaagttctcttctctagtagcccatttacatttatctaagctatatactttattacctagttctttaatatccttatctaacactaacaattaactctacatccttacatgagctaatttagaatatagcttattgtgattatatctttctcctattttaaattctatttaaatcatccttacttattaaattacacttaaattattctacacaggattagcattttaaagccttccctgttagcatagttcttaactaccatttcctgtagctcctaacgtgaactatacaccctatactcaataggtttacctagttttactacggctatattttgttaaccgtaaattaaaccaaaggctacagctttactggcttgtctttcttctgctgttacgtccttcatacttttaccatacataatacttgccgtatttttatgaatatcttgtcctgttaaaaacatctctaacatttctttatcatctgtatatagtgccgtaatacgcatctctaaggcactatagtcggcttgtaaaattacaccatctttaaatctagagataaaagaacgtttaatagggtggtgataatcaaacttatttatatcagatgtatgagcaggtaattgttgcatattaatgtttgaactacttaatcgacctgatgcagttcctgtactattatagttaccatgtaaattatgtgtattcttatttactcttttaggtaatttcttagtaaaagaatttcttttagtttgcaaagaggcataataaataagtaagtctagtagctttttattatcttcattctcaaccaaagataatgccatctttatagacttagtatctgttttgtagtctttccatgataactcatcttctttagtactattactgaaaggtttatccttaactgtctctttactataaggtaactgtatacctaaaatgctatataatacttcacctttatggtctcctgagcttggtttgaacttccaaccttcatctttaaatttagctctatactcatgtatttctttgtctctatcagatggtttcttctcatgttctgctagggctagttggtataaattatacctagtttcttcaaattcttggatagcccaatgctctctaatttcttggtgggttttttccatctcattaatataaaattcatcatttttatgcatgtattctaagtcacaatgtaaaccatttgattgtattctagctaatgttctaattaatctagggtaacttattgacattaagttcaatgctttaggtctattttgttcttttaacttttcaataacatcacagtatattcttctacagacatcggtgtcaccactggcataaggatgcataagctctaatggaatccaatcataattaaagtcacctccatctacctcattaataactttagtattgtccttatacgtgttaattaaattaatagatgtacctaatacataatctttagctttgttagataaactcatatactcgggtgatgattcggctacttctttaaattcagaatccataagcatattctttgtaataacctcaggtgttagttttaactctaagtatcttttttgctcttctgtgataccataatacttatcttcatctgttagttctatatcaatgttatcgagtttatttttcaaccaagtatcatactcatttgattttatgttatattctttcttagcaacttttttattttcttttttaatctcttttagtttatctgataagaatcttagtagcttcaatacataccactctttaaaatcttcaagaggtttgtcatatcctcctacatctgttacttcgtaagcaaggtctgataatcttagagactctgcttgttcttgtgttacagctaaataccaacctaccttagtgtcttgattattttcaaagtctgtgaaaccttgtgttgtcattagaaaatttatatcataagtagcattatgtagtaccttaatgtcttctttgctagctacccattcttttaataaggaaagaatttcatcaatatcttgttgtccattctcccaagtaaagtctgatttatataaaggtattgtaacaccttgaccattttcccaactcattgataatactaagggtttacttccttctctatcaggactaagtgagttagtttctaaatcccatgcggtaatgtctacaccgtcatgattatcattctttacttctttattaaatatttctcttacacgctcaatacttgtaacaagttcatacttaacttctttaggtttaaatacgtcttcaccttgttctacaaacttacctaataacttaaggtcagctactacatgacgctcactattcttattaacgtttgtgtactctatgctataagtaggtaatacccaaacatcatgttttttatcttcactagtaatagttactttattaggtacacctctaactttaccgatagctgatacatttaataaatatttaacccctagcttacctaaaggaataataatatcgtacttattgtttatgattatttgactcattctttcatagtaaggtttaacttcagataacttaacgtcttggtacttaattgttttaccatagttattcttaataggtgtaggtactttaggatataaaaaatcaatgtcataatcctttgtgctcctatctctattaataccagaaatattagacaatagttgttttagtactctaccattaggtgtatttaatagtacattcttaacactaccatcattactaactgaaaagtgttcctctctgatatagtcgtataaaattaaaactttcatgttattaccaatcccttctttaacttaaatacagtatagcatatctaatcatagtagtcaataaaaaaaagaggaacttaatcctctttgtttaatacatctataactttatctaattcagacaaaggtttaaactttagtgcctttctattaggtaatgtaaagtattttttatttagtccatcccatgcttttttacctttacgctctactacttctatttgaaagtacttatgattctttaccttatcataatcttcaagtaataattcagaaatagcttttgtttctgcctctagtatctcttctacgtcttggatatagtaccctgtactctcagatatctttcttgctatatctcttctatttgctgtactcacaaaatcacctaaatcttaatctttctttgtctttttaattcagtaagtaggtcttctattgtttcataatctttattttctttactagcaagaatatagatatacattttccacacggacaaagaaacccttaatttgtctgcaaagtcaagcgtatacctaggttttagtttataagcttctttatcatacgtgtagtacttaccttgtttagcgtctatagaactaatacgagggaatgatagatgaacctcgtctacattcgttttaacatcatataaacttctaataatatcgtaaggattgacgtaaggaaatacaactgaaatatcaataatgacttttgttcccatgaaactcaaagctatattatccatctctttgttactaaacttactacgcattctatatacaactgatgatttagggtgagctgataaatctttaagcacatagtaaggtactactgaatcagtataataggttacttgtccaccgtgcttgcatattttttcaattagcttatcgttattatatttttcgttaaatagcatgtaatgtttatcatctcttagtatatacctagttgatttattagctaagatatccatatctttttctatatcatcttcatttaaagttgtaactttagtagctttagataattcatctttatcttttacatgtatattaaaatatctatcactattatatatagttaatgttttattttttgcgataactattcatcctttcatgaaaaaacctactaccttttactaatataagtatagcataagtagtaggtaattacaaattaaagtaaatctaattccattaagtttttaggtgttacttggtcttcgaacttcttagcaagttccccatctttatatccaataagtacaggtgtactcataatgtcaaataacttgaccgctttttctctatctacatctttatcatctaagttaataacataaacaggtttagtaatatctccttctgcttcgaaaagaggaatcacactttttaaaatttcacatttagcacactcatcttgtgtaaccatgacaataacatctttcttttgtctaattgttgtatttaattctagtaaactattcactttttccattttctgtatcatccttttctagtgtgtcaataatatctttaaatgtttcaatatcagctacatgtgttaactgctccgtaccatcatctttaaatagctttaatgtaccttcatatataagaatgtacacatatgtattataaataaactctagctgaaatttacttgatttactatctgctttagtatcatcttccctattaaacatcttaatagggtcttgtacattacttacttgtgagaaaatatcatttgatttgaatatatcttcagttctacttagtaatccaaacgcttcttttttattcatttagccacctctttaggcttcacaattaatacaaattttagataaattgaattgttgtgatgcatttgtaccatgttgataatacaatgacttaataccattagaccatgcaaagagataaagttcatttaactcctctgctgtaacatgtttagggttaatcataatgtttatagattgtccttggtcaatatatttttgtcttgtagaagcttggtctaatatattatattgattaatttcaccatatgttttaaatacttccttttcataatcacttaagaaagttaggtgttgaacggaaccatcattgtccctaatactctcaataacttttttattgtcctttcctttttcttttaatagtcttttaaggtaaggattaatcatagttttctttactttagcagtgtctacaacgtaataattactcataaaaggttcaattgatttagaaacttgacctaggataaatgacgaacttgttgtcctttatgttccatgtagttcgttactttacatgcgttaatttaataacagctctatgtttccatagagagcagactatatcacatcttactaaatgtaagaccactcccacttccactcacttgagtgtactccccgcaacaggatagtcgttgaactttatctatttatatcttgacagttttttaagtactctttaatacttacactatatacatttttatcttttttaagtctattatagaaaacatcttgtcttactttaagagcctccatagctttctttgcactattataatatacattatttacaacataacaagagcctctcgtatttaattttcttgatgttttccaaaaatctttattgtgtactttatatggtttttctatccatttaaatgagatgtacccatcagtttctttttctactctacgtataagatttctatttatacctaatgttttacccattaaagttaaggagtcataactagaaaaaggtttgccatctaagtagactaaaattagttgagcgttagcgtgtttaacacctaaaacatcataaccatgtttagtattttctgatatagtagcccattctaaattttcaaccctattatcatctttaatcccattcttatgatttacaacaggtttattgtatgggtttggtatatacgcttcttctactaatctatgaactcttgctgatgtggatgtaccatcttcttttcttgtagaaattattgagtaaccatctttatcatacctatgtcttttttctacatatcttttccatgatttattccacattcttactcttccatccttagttacttcgagcctaggaaaactaatactatttttccacatttattatcacctcttagtaactagtataatgtatatatttgtttttgtcaagttagctataaataaatcttagcttctgattaccttatgtttacacacttaggcttttcagaaattcaagagtgttatcatatatgttaatccatatacgccctataaattaaggtgctaccgccatcaaacatgaatttcttctaccataaccttttaaaatagtaggctctccataaagtttagctaactgctcactagctttataagttttttcttttaataatttaaatatctcttcattaatttgactagctttgatactttcaaaaggtatgagttttgattgtaagtatgaatgatatccaagcacgcctattcctagggctctgttctcaacagaaaagttataagctctctccataaatttaaatgcttcttgtttatttttttcatctgagtctcttagatattctaagtctctaataaactcagacataacagcatctaaaaagtaaacaagtgtctctacagcatccgtgtgtttccattcatcatacttaacaaggttcatactagataggtcacatacaaatgaccaatcttctttattaggtaacataatttcactacattgacctgttaaaataccattaaacattcccatatgtctcttaggttctgtgaaacagaaagtatccattgtttcttcaatttcttcaattcctgttacttttatgaattgagaacattctctgttaggttcttttgtttcccatgtaagcctattacattcaagacccaattgatttaatttatataaagaattaccatttattaatattctatatagctcttttgtcttaaattctttatattctccagtaccatcattagctggcatcatagaagttccttcttttttacctagagttactttactatctactcctaatgtttgcaacattaattgtacatcttttaaaaactctttgttaattgaacctgcttgaatagactgagaaccattattatttgttactgtaccatctgcatctaagaaacctgctaaccattttaatctactatcaatagtgtactcgttcattggaacaaaatatttatcttctaattttttagtaagacctacatgtctatcctgttctttactttctgaccatttgtctatagatttaaaataatcaataagtttttgcttttcaccgtacaaatagataacttggtttttaccatttagtgttccatcaccagtaaagaaaccattatcataagcaaaatttagttctttttgaccttcgataataggtaaatcaaatttaattaatttatctcctactttaaggtctttagctctaacttctttatatttattttttcttgctcttttacctgatttagttgtttctaatacgtaatatttatgataaggtgtagagtctaactcaaaaccactattagtttttacttttaacatttcttggttttctccagtttgtttaactgttacttcagaccattcttcaccattccatacattaactttttggtctttaagtttacctatttctttgtatccctcgtcagtcagtattttagtatatggtgcaacacaaaggttagagttattaatagtcagtcctttgtctttatatacatctactgtattattgtttgcattatcatgaaagaaaatataagggtatcctatttgtgttcttcttgttaatactttagcccatgtttttcttttttctttatccccattaatcatgtctaataaccagtcatcagtaactgttaccgcatgtgttaagttttgaattggattaccttcggtaccaatctctaaaaactcgtcaatatctttgtgttctataggtagataagggctaaatcttcctctgcgtgtagaattaccacaaactaatgtatgccctttccttcttacaacaagtttatgagtaggtacttcaacacaatatactttacctttatattgtaccgtttccacagtaacatttgagcctccaaataattgaccttcagatagatatattttatacatagtggctttattaggttctctttcccttaaatcaactgatttacgagatttataacctaccatagaagctatggcttgaacaatgtctacattatgttcaaccacactcatgtagataaatgatttatccgttcttctactagcatcccaatgagacaactcatcaataaaatcataagcccattgttgtgtgacattttgtaaatttacccatttactaaattctttaggtaattcttcacccatattaacataaatattatgattattgtctttgtctacattatatgtgtattcaactcctagaccatctaatatccataatagtctatcttttttacgttctttactaaatctaaacttcaaagatttagggtattttttaataatactaccatctgcttgcaaggctaccaaaagacgttctttaaatgtgagtcctctgccttctttagcaaatgaagaatgtgctaaataaacgtctctatgtaatggcatatcttctgctaatctatttctatactcaggtactaaaacactttctctttttcctgtttctttattagtccttttagttctgtatttaaaaaccatattatggttcttagtcactaataagtcaatatttttactatctttaaaatgaactaattcattatcttcaggtacaaattccatataatctataggctctacaaactctatttcatcattatctgttacctgtgcaatttttgttccatcttttctactaactacattagataataattcatacccattctctgtgagtatttcagttttatcatcataacatccttggcttattgtgtccgtcatttgctcaaataacttcataaagtgaacggaaccgcttgttacaccattatcagtgatttctgagcctctaggtctgatattaccgaagtaaccacttgtaccaccgccgtatttactcatcatacctacttcactagcagtattaagtatcgatggtatagtatcatctacccaactaccaaaacaactaatactaaatcctctatctttcccgaaattagaccatataggactagataaggaataataacctttactcatataatcataaaacttgtcagaaaacccatcaatatctaaaatatcttcagcataatctgcaatatctttaattctttgttctggtgtttcaccatcacttaaataaccacgttctagaaaaactctagaatcattatttaaccattcaaaattactcatctatatacactgcctttatatcatttttagtcttaaaatagcgtttactttatctttagtaactcgtttaccagtattttcaaaatcagattccgttgaaaaaatagtatcttccgttacagaattactaaattttgtatagtttacagaacgtttagataaaaagtccgttaacttagtactaataacttcatcatcaaaccatgacacttcacttagtaactcttcatcaacatcaaaaagtttattatacccaacagctactagagagttattaagtctatttttaataaattcttgtactactttcttaggtaagaactctagttccccatcttcatacatccaatcaagtaaccgtgtttctgattcataagattttttacaggctgtgtaaactgcatcttccatttctttgttgaaccactcaggtctttcttctctaagaatattaatgatttctgttccaaataatccatggatttgctcttctttagatgtagcttcaatagcatttgataaacctctaaataagtttttatatttattaaaactcatcataattaaaaattgactaaataaagatacatgttcaataaatatagaaaataataaaacagatagtacgtaatctctatcatcctcactcttacttagttttacatgcatcgctaactcatcaacacgttctttaagagcaggaatatcgtcaattgttttaaactcctcattcaaacctaaaatctctaataaatgtgaataagcgtcggcatgacgtgcttcactctcactaaaagttgcacccacagctccagtttcccatttaggcattctatgatataggtcaccccagaaagtctttactgctacttctacttgggcaattgctagcatagcttttttaatggtcatttgctcattgtatttaacgttattcttatagtcttgaatatctgatgtatagttaaactcagtgtgtacccagtaactttggcgtatagcatctttatattctaataattcagggtattcatagggttttaattcttttcttggtttgaataagtctcttttacgctctcttttctttttatccctatataaaataaaagctttagcagtatctttatacatactactaaataaaacttcttctactatatcttgtattaattctacagtaatgatagtgtcttgttcttctagtaaagagtctacgtcatctacaagagaatcaataacatcttcaatatattcttctgtttctgagttggctcttaaaatagcattagtaactttacttaaatcataatctacaacggaaccatcacgtttttttatttgtgtaatcaactagtatcccttccttatataccatcaagtaaatcatcaatcaacttatcttcttttttactaactttagatattttagacttgacaactctatatggtttaatctcttttttgttgtagcaagatataatataagaaggtgttaagttagtcaacccatctatcgtagttataagaacatcataaaaatgtttgtcttttctaacattctctataataaaatctgttctcataatagggtactcttcatctcttaacttaacatatacatcttctatataaggtaatgctacatatgactgtgctctatttcttgtaaatattaaacaaggagttttattaacttgcaaactatctcctataacttgttcccaccatgtatgaggttctttattattaagtagaacattatccataatccaattttctctatgtttacactctacaactaatggaaaattagactctaaaggtgctacaatgtcaccgacagcattattgttagctccccatgatgcacctcctgattgtggagacctactaaaaggataaccccaccaatcagaaagttctttggcaatctttctttcgaatacatcacctttttttttactatttgtcatgtttcttcaactgcactactttttcattatcttcttttgctttatgctcttcttgtttttttcttacttcttcttgtttttcttctaaatacttttcacgtttttcttttaatttaagttgcgccttctctacttgctcagtagttacatctaggttatcttccataacaatcattaacaaatcaatagcattaaaagcatcattaaaggcagatgcatactcttgaactgtaacggcattaattgctcgtgcaattctagtagcctcatctaatgatacactacgtgctccaatacgatgtaattgcttagcagtgtcctcagttaattccttgccttctactgttccttgtgtaatagcttctaaccacatgtccatatctttttgtgaaataccttttgtatgtgtactaatatttttttccattattcttcatccttttcttttgattcttcaattgcttcctcaatatattttaatacgtcatcgttaactaactcagctttgtataaagcatcaattagaatgtttaagtttaactctgtattttgctctaggtcaaccatttgtttattaacacctaacaataagttagtaatagctttcataacatctgttaaagttgctgtttgttctttacctaactcttctaattggtgcatacgctgttcattacctacacgtaatgctgtaacatactcatctacaaaatgtagaatatctttctcttccaaaataacacttcctttatttttatatatgtattgtaacatactatacattataatgcaagattaaagttttaacttttgttgtaacttgtaactttgaatactttcaggtgtaactaaaaatctattgtgtttcaaagtactaaaagctttttccatacccatatcattagcatcttcattaccatgtggtactaaatacactacattgaaatgtgagataagcttattagctaaattaatactaaagtctgtagcgtctgtgtctaacataatatatataggtgtttctttaggaatacttgaaatgaggttattaacttgtatctttgaaacttgtttaccaaacgtagctataccgtacttatcaaatgtaagggcgtcaaaaacaccctcagttataacaacaaacttttgtttactagctatatttaaattaaatataacatcgcttttaccatactcattaggtttagaaggtgcatttatagatttaatatatggatttgtttcaatacttcttgtattccagtatatatacttaccttcattgtcataagtaaaaaatataacactatttctaagtactattttctttttctcattattaataccataagaatagcaataaccatttataatataccctatactatagtctaggatttgctgtagtgtaatacctctattcttgagatatcttaaatacggtactacttctttattatttaagttatctttaatcaatttaaaccctataggtagttcaggtgcttttgattttatactactattatcttttgtatatccattaagccttagtaataatttctcactttcagttaaatctgtgttatatatttctaatgttggtgagaattgtatatcaatattctttgtttctaataactcaaaagcttgtctacctgtaatactataataagatttcataaaagtaatagggttaccatgttctccacacttcttacaatgatacataccattagtagagtctaaagactgcttaacataaaacttgtatttctgttccccacaaaaaggacaacaatatcgtaattctcctacagtattctctttgggtgttccaatctcttgacttaaaaagtcttcaaacctcattttcagtcacttcctatatagaaacaattttcttcattaatagtaacatattatagatttgacttaaatcactataagtatcatctaccagtgttgtactgtacttgagtacttcatttaattgataatcctctgatttcttactaaaggtgttaatctcttcaattgttttatctttcaagtactcgtttgtactgattgtttttagtgtttggaaaataacacctaagtcactaaatccttgctttacatctttacttgtgaagggttcatctatagtaggtaaaccgtacaacttagctttctcaataattttctcattatcttcttttattttttcgttataccataatcctaatttacatttaacagtttcacatttatataaggtttggtgagttaacccataagacacaggtaagctagagcgtaatctctttagttcaatatatccaaagtcattactagctttatactcgtatgcattacttaaagggtaccagtctactaaagtagaaacaggaatattatctatatgtaactttgcattgtttgtataatttactgttaaagatgcaaactggttatctttaatctttagtttcattatttaattcctttcttagtgtagctacaccgttttcttttactaccgtaattgtattctcaaataaaggtgctagactcttattatgagtaataacaaaaatagtacctactgtttttagtctatcttttagtagtttaactacgttctcacaaccaatagtgtctagaccatcaaagcattcatcgtaaagggctatatttgtagatatatcttctttactcataattaagtcttggatagcaaaactaatagctaggtcaatacgtttttgctctcctgctgaattagatttgtaagactctcctccattgttattcttaacaataacatcgaacttatctttaagttctcccttagcattttctacttgtgtttgaaattcaatttcgatatccgaacccgctaatatttgtaaatactcattagctttatcatttaagaacggtgtaataaagtctaatattacagaacgtaatcctttattactaaatgcatctacagcttgtttatattttgttttcttactctctaattgtactatattttccttatgtttgtcaatagtattgtcaatatcttttagttctttattgtgtaattcttcattaggttcttctatataagagtaatcatttaatattggttcttttaaattagctttagtgttttctaattggctaatttcatcatatacttcttgctgttctctgtattgccgttgaatatcatcatcatgttttttcttttctatatcttcttgctgtataaattgttgtaattctttagatttagctagtagctcttctttcttattaattatagtctgctcattatgttcgtactgagatattttagcttgtttttctttaatttgtaattctaagttttctttttcttttattttgtgtgtattatctataggagaaccacaaacaggacaatggtcatttgtatctagcttattaatagattgttttaattgattaattatatttagagttgtattcttatttgttgtttcttgactcaataatggcaataatttatcattaatatttgtgttaatcttttcaataccttggttagcttttgtataattttcactaaatacaaattcaaagtcttcaactttaggaatactacctttacatacaccaatctgattgtctaaatcttttaatttattctcgtactcttgtttcttttgattaaactgttcctcttcttgcttcttacgctctaataagttattatatttatttacttcattattatattgttcttgttttaggtttcttttatattctagtttttctatttcttgttgttctttactttgtttctcctctacttctttaactttttctttagctacttcttgggcttgcttataaatatcagtcttagtaatagattctagtatttcttttttacctttgtcggtagcttgtgaaaacataggaatgtctccctgccgtaagttaaaacttataaataattataaactttattcctttttcaacgtatccctttttgagtaaattacttatatattcatttactctactaaggtttgtatgatactccaaaggcgttaattcggatttacggaatcctacatataatacatttcatttattgtgaaattatattatcttgataccatttggagtatctatagttctttaagttaatgctagcattataatctctatcaagattagtattacattctttgcatttgtaatttctatctttaagactaagtttatcttgtttagttaaacgattaccacaacaactacaagtttgactagaaggatagtaagtattagcaacagtaagtaatattcctctatcttcacatttataaattaattgtctacgtatctcataccatttaacttcgtttatatgtttagataaatgtttattctttcttaggttgtttacttttaaatcttctattactatctcttgtggtaattgttcgactatttctttagtcatagtatgaatatgagtatttctaatgtttttaagttttctatataacagttttatttctctttctaacttaataatatttttagttcttcttacatacttttggattacttcaccattacttttatttattttaggtttaccatttttatcaagtaaacatccagtcaagtaatccttattcatttcatactttctacttacttgtctttgtagcctagataatttcttttctagttttttaactttagaacttttattaatatttttataagatttaccattagaacaagtagctaatgttttaatacctaagtctatacctattgtttcattagttaattctcttgtttttcgaggtttaactttataatttaattttacgtaccaatacttaccgtcatacacaacccttgaactataaaaatatatattggaaaaatcaatattgaatctagtataactattacttagtgttatttttcctaatttttctatacttatagttttattttttaaatttatgtacggcataggtgttgtatttaatccattaggtttatctgttcttataggaaaagtatatgcactggttttcttacttttatatctaggtagtttagaaataccactaaaatacattttatagtttttttctaagtcttgtaatgtctttactaaagttttattagatatagtgtataaccattttttaccactttttaggtgttttaactttttagcaattttattactactaggtttttcgtttttcttgtacatatcttcccatgtatacaaaccccaattataaataaatctacttgcatgtacgtgtttccacattaattcttcttgttcttttgtaggtaataatctaatactaatacttttatatttctcttctaacattatatacacctccctgtagtattaatatactacataaagggaataatatcaacagttatctggaataaaattttaattatttataagttttaacaatctttaacattagaacgctacttctaagttcttggttatttccaagccctatctttcggtacgggcggagactatttgttatccctaaattatagggtaaggatttttcttctcccaatagcttggagctttactcccgtcttgtaacgggatagtcgttgaacgtgttccgtagacctttcaggtctttaggactttcgatgctatacacccattgcacttctccttaggatttaaccttagagtatctcaatcattttttctactttcgtaaccttctagtttattgtttccaattcctatgtggttgattgagctttagtagtttcatagcagttaacccttcactttatactaattacttaatacaaggggcaattacccatatataatagcatttacatatgtattaaaaggaataccaaataactcttgtatttgagtatccgtaacatcatttatagagcccgttatctctttgttattacaaaacagcttaaccttgttcttgtgttccttgtgtttacgatatctttcgattaaatactcgtctttacctatgttgaaagaaagcttaacgtaggtgtctttcttcttatacttattaacaacatcatctgcctttaaacctttctcagtctttccgaacagtgcatatgtgatagaggatatcatgctcgttttacttgttccattactttcaaaactatcatttgttttattaataccttcaataagtacaagaccttgcttatccagatttagcttgatatgctcaatagctaaaaagttattcatctctacataattaaacttaaccatttgtaccaccttcttttaacaatttaaagaaacattgatgtgaaccataatctagaatataacaatcttcttgttcaataaccctcgtataataatgagcgtagttagcttcctctagtactttgttaataaggtacatcgcatcatcaatatttttaacattacatacatcatatgttcttttattatgtaagaactgtaaaataggtttagatttatctatacttggtttaatattctttataataatatctatcatactacaacaccgcctttaaacactctagaagctcatcttttgcttctggatagtatttgtctgcataactagaagtaatcgttatagggctgtcagacacgtcagcgtcgactctcttttctaccgtgtattctttcttcatttgtacttgtacattagattcatcttctgttttatctaattcaattactttagcttgttctggagtaccaataaacctaataaagtgaccttggtttactaaatcattcatgttatctggtacattgtcaccttgcactgtaataaactttctagtatctaatggaatgaacgttgatgttagcttatctgtatctattaaatgtacaccattagcttcttgttcatctgaaaaggattgttgcattagagaaccaccatacatatgattagggttattgtttaaatattgtcttctatgatagtgaccaagaagaataaaatcatatttttctggtaataggtcttggtaaccaaatgcaccttctaatctgtgtgagcctttacctgttaaactattctctacgcctaaatgtgctactaatatatttactttatctttttggtaagattttttaatatactccttaatttcttctgtttcatctccataagcacacatagttaattgtactttactagaaagtgagtcactacgtaaatctttagttacttccacattaggtaatgtttcaaagatatcaatactagattccgtatataaagaattagacacagcatcatgatttcctctaaccatatatactttaacatcttgattcttagcaaaggtttcaaataccttattatatactctagtatctaccgcatttctcttatggaataaatctcctccaaatataactttagctttattttctctagctaaatcaaatactttttgtaatgtctcaatttgttctttaaatctatcattaccatattcttcatcaggtttactataattcgtaaacatatgaaaatggctatctgtaaaaaatataaatttcattagtgtcctcctttagtacgttatgataaaagtataacccttaacaaacatgttgtcaagggttttgttttaatttgtattatttagtaatctatcttgtgccatactgaagtattcttctgataattcacaaccaataaaattcctatttaactttttacatgcgacacctgttgttccgcttcccatgaagcagtctagaacaatgtctccttcattagttaagcactctaacaaccattccatagcatataaaggtttatgtgttgggtgtcctttgccctgcttttcacttctaggtgttacacttgttttaatacaaggtctttcatatttttcatctaaacggttaaaagtccatttagctccttttttaacaaaataaagagcaaattcagtatcaaaaataaatcgtctatccctattacgaggcatagggatagattttttcagacgaataacatctttaaattcacagcctaattcttccatagtattaatgatgagtgtgaattgtctcatgtcacaaaacacaacgatattaccaccttttttaacttttggtatagctttattaatccataaagtagcttcaaaatttttatcccattccccaaaatcaataccagctctacccatagttgtgaacctgttctcttttgcaatattgtatggtgggtctgtgataatagcatctacactactatcttcaattgtatctaataactctaagcaatccccctgtaataattttatcattattttactccctcttcactaatttctataacatcatgattagcaaactcctgtaatttaaacatatgattgtcattaatctcatttagtagcttacttgaataaaaatgtatcaattcacatacctcatctgtgtaaggctctcctcttaatatatcttcaaggatatccattgcttcttccgtatctacctttacgtgtcttaaaaattcagtcttatcttgtagttcctgtattgtcattttcattgtttagtatctccttatgtttttctattctttcactggctaaattatagtattcttcgtctaattcaaaaccaatgtaattgcggttagtactcatacaagcaatagcagtagtgccactaccaataaacccatctaaaaccacatctcctttattactatgcttcataatacattgttttattaaatctaatggtttttcattttggtgtaattgttttttaccacttaccctatcaaattcccatacatcagttaatcttctcccattaaaatgttttttgccctttactactaaaaataagatttcgtattttctaccaaaagaaccttttaaatctcctgctgtatgattgttttttacccatataatcatattttttattttaaatttcttctctaattgttgtttaaaaaaatctactttctctgatgagcagaacatatacatagcgctattgttttttaatatcctgtaacactcctcaatataatttataataagttgttcgttattatcatttaaaataacttttccaaatctatgctctttattttttctccagttggttttataattaattaaataaggagggtcggttactattaagtctatactattgtcaggtattttcttcataccttctaaacaatcttcgttatatattttatttaattctaattccatattaatatcctactttcttaagtgtttaattttattgtttgttaattctaactctataatacttcttttaggcttaatattaaacaatttacaaccatacttatctattacgtaattatccaatgtattaaatatatcggttgagacatcctctaactccttttcagagtactttgtgtttatagtctctataaatccgtgcttattaatgactttaaagttttttaattttacttttgcttcatttaagttcaaatcttaccacctctttattgtttataataaaagtataagccttaacaaatacattgtcaaggctttttctcaattttttaacttatattcaattgctttaattacttcttgatgtgtattgcaaggtatagcaggtactttattagacataacgttgtacttatatcctgttgtattattccttgctatagagtctagtaatgtaacacatacattagttccttttaattggaaggttcttaatcctgtatttgtataatcccattctgctttattacgtgtaaatgttctacgtacttttttataaagcttagtaaagtcatccattaaaaactcagccctccaaaagaattattaatagcttcagctttattaggtttttctttaaatctacttttatcttcaccattaagttccgctagtatttgcttatgttcttctgcctcttctggtgtttcatctctaacaaccattttagtaggctctactttaagattaacaaatctctcacctgtgtttgaactgtttcttactttgtctaagtacaatcttaaaaaaccatttttaaattcttcatctttttggttaacggcaaaagcaacctctacagcattgacaatctttctacttccctcaacatgttcacttgtaataatttctgaaccataagctgttctgtttgtttgtgctaatgtccaacaaacaaaattgtattcttgtgataattttcgaatatcttcaaagatacgaccaccagcatctgattcactttgatacttaaggtaagggttacgcataagtttaggataatcaataataacaacatctatatgcttatctttcttaattgttgtattaattataatttgttctaattggtttggtgttacctcaccaggcatatgtttaacgatataaaagttacctagcagttgtctattctttttatagtgttcttgtatcttattataagcatctgtgtttaaagataagtcaccattaagtaattgattcttttgtacacctaccatttgttgttccgctcttaataccattctatccatcttttcctctagggcaatatataaaacatttaaaccttgtttaacatagttcttacctaaattacttgccataagagacttacctctacctgtaggtgcgataactaatcctacttcccctctacctataccaccttcaatttgctggtctatagaatggaaacctgtagagtacttattaatacttaagttgcttaatagttctctctttttatctacgtcttcaaagaagtcaataaattctccgtcagtaccattaatgtcactgacttctatttgttttagtttctctactagttcaggtaagttatctgagtcctcttgcttattctcagctatgaacttaactaatacttctttagacatttctgttttaatatacttttctacttcatagtttacagaatcgtctttattattcatgtctactgtatataagctatctaaatattttaatgtttgtgttactttttcatcatcttgtttatcactacccattaattgctctactttaatagctaaagattcatttgacattttatcagcaatgtgtgctgttctttttatagctgtgaataagtaacccatgtcttccgattctgtagcaaatagacttttaggtaacttatctagtacttctcttgcaaaatgtatatccttcatagacttatgtaggataatctccttaattcgtttactcatatgtgtcatcctttactatatcaataaccttattatagttcaacataccttcttttgtcaatggtattttatcaattaaattatatttttcaattatagacttaacttcttttaaattaacctcataacctaagtaattactatacatttgtagaatatatgatgttgaagtaaatcttctcatatgtagataattcattgttgtttgttctatatttacaatatcttgtttacttaagtctgtagtgtttactaaacttatacctattaagtctcttctatctataccaccatttaattctgcgatatttgctttatactctttttgcattaaaaacatagatagtctagcattgttaggtattgtagtaggtgaatactcatttacaatacattgtttaataaatttatttaataagtttttatgtttactaggtaatttttctattagatgttctatatatttattatatgataaaagtataatatgtttcatgccattaaatataccataaatagtatcttctatatctaaagctgttttaaacattgtatcaatatcatgtatctcttcatttaaaggtgttgtatataattgatgtaattgtgctacagcaggatttaataggtaatcagatgacttaattaaagactctacttctcctacttgtctatttgttttatttactccacgtttaataccttttacataattttcataattagttaggtatttatcggaactaaaaaaatttggtgcaggtatagggtaaggttgtgttttattctcaaaaccaaatgttgtatttttaaaaacattttgcatatacttaaatacattaatatttttatcctttatcttaaggtaaaagttgtagaatgtattaaatgtcttactaccaaagaagtctttacaaatactatctcgtgataaattctgtaacattttctttctgtagtactcagataaatgcttatgtctatctgcgtcttcattaccatttgataatattaaatgttgtatatatttagcattcatgtgtgctatagcatattggtcatataacttgcataagatataagctttataaaaaccctcagggtcataagacatattaaaaatatctttagtagggtaaggtaagctactattataaaaattcatatctgatattattttcctgtttttatctttactagcattatattgaaccatttctaattttgttctacgtttattttcttttctttcatatacgtagctaggaaaaaatctatttcgtaactcagtagcgtattctagattagaagtaataacattatcatttgtgtcattaaactgtaagagactatctgtatcatagtctcttactagtgatataacaataccacctttatttcctcttttagaaacaacattaattttgttatcctgctctaatcttttaaggtttttagataaagtagagactgagacatctagttcttctgctaactcttttttagtagctatttgataagtattattttttgattttttttcaatgtaatcatataatcttctttctgtcttagtcactactcatacctactttcctaattctttaatttcaaatttttcttcttcatatatttttctacgctcattagaatgtttatataaaaacttatgtgtcatatcattaaaatcaaatatctgtgttgtattatcttctttctttttacgtaacgcacgacctacacgttgtagtgtttgtcgtaaagatttaccacccgcacctaggattaatgaacgaataccactgatatcaacaccttcatcaataaggcttgtagcaatcataactttaagtttaccattacgcatttcatctaacttttgtttacgcatatccgactctatttcaccatgtaaaaagaaattctctacacccatttcattcaacatagtggatagtatttcaccatgctcaacaaaattaataataataagcgtagctttatcttgattataccacttagctgttagttttgcaataagtttatttctaaactcgttatgtacaatacctttattatatgcatccctataatccttaatattatctatatcatcaggattagcaatagggataatatttattgtaggtctagctgaatagccattctcgattaaaaactcattagatgttcttacaataatatctccaaataatgcttgcatacgcatccatagtagctcatctttcatgtctatggagcctgttagtgctatcctgtatagtgcattctcacaggacattaaacttgtataccatgaatctgatttactgtgatgcgcttcatcaactatcattacagctatagagtctaggaactcacgcattttatgatatttatcatagctcttttgatttttctttcttacttctttttggaaaataacattatgattgtttaatgccattaatacttcagcatccgtctttgaattatgataaatatcttgaagtatatcaagcacattctgctctactttagttttaggtgttgtactttctaataataacttaagtaaccttttttgatttttaccaccttcaaatttaggaagtatctctttagctatctttttacttaagtttactttagcagatacttttactccttctgtagggtcttttaagttagagttaacagtaggaatcataactacagttacttgtttaacatcaaacttaccagaacctactttacctactggtatattcaatcgttcacttaaacggtcagcagattgattaaaaatctcggtagagcttgtaaaaaaagctacacgctctcctttttctagctgtggtaatagttggtctatgataccgctagcaacctctgttttcaattatgttacgattaggttcgttactcctaaccttcttgtagtctcctacaaagttcagactatatcttaaccatatctaatgagacttaggttctccctgtttccaatcacttgattgtacataatagtcgttgcaccttcctagtaatttattaagcttggctcatgattgtctcaaatgagagagttcccatgaattaaaggagttacacttataatatttctactataaggggcaaaatttacctgcattggtagcttgcttgcatataccattataattgacaagactattaaacacagcttcatactgatagtcacgtaatgtaatcttacctacgttattatctagtagttgtatttcatcatcaatatcttcttcagctaaaaagatttcagatttttcatcaataatttcgtattgaaagttatgtcttgattgtaactcacctagtaatgttatcatcttaggtaacaacccgctagggaatttgttctcagcataatcgtagaaatccacataaccatcccacacacctcgtttaaaagctaagctatgttgatagccctctttcttagctcctaacgttttatgaacacgcttaagtatgatatctttaatatacccgtcactttcatcaaaatctacatatgtatatatattctgttgtcttaactgcatatattctcctttctttttagtcctttattatcttaccatatttattaaagttagtcaagaaaaaaaaagactaggaattatcctagtctatggtaaagagatacctacaacacgtgtaacatattggtctttattattatttactgcactatctttaattgtccatgtatcaccagtaatagataaagttactcgatagtactctactccaatattagagtctcctgatacataagctcctgaacatgtgtaaataccatctccatctatataaaacttatgacataaagtacctgttttatccgtaccttttgtgttttgtaaggctctgtatcttgtgtatatctctacgtattggtagttagatatagaatcagacatagtttcttttttatttgtatctttaaagttatgtgctccattccatagttctttaaaaccaggtaatgtttttgttgtgttccatgtattaccatttacggaaccattaatagttctaccgtcagtacctattgcggtatatacaccatataaattagtatagttgtttgagtctgatataaatatacctctgcaactaaccgtagacggagagcctgaaacaccaccttgtatatagaaagtaaaaacagttttacttgtttcttcaatatgtttagctatagcttgttggaatgttatattgtctgatgtatatacggataatgagtaattattgttttccgcatctccatttacattagatacaagatacttgcttatcttttgtacgtctaaatcagttctccaatcaccccaattgtcatacgatttcttaacattaagatattcttttcccgtgttactatccgttaatcttaacattctattatcattactgtctatggaaacttgtaagaatccttcataaacaccactaggcatatccgacatattagacacgtaatatgtaccttgtgtattaatatcaaaaggacttccacctatatgtgatgtatatttattattaggtaaactttgtactacttgccattgtgatgtttggtagttagtaacgaatcggtgcatcacttttgatttactgtcctccgttgacaatgtatacaatatttgtattactctatcctcagtatctaatgttaatacttgcagtaatacatctatattttccatatctggtttatcatacatagtagccaatgtacgtgctcctatgtaatataaacctacttttttaatgtctcttaagtaattggtataatctatatctttagctaatcctctatccgttgttaacttaactttctgtgctttacttacgtctaattgtaagtctgtagttacttcaaagatatttctatcctcagttaatacactacctatgttattaacttgttttgttaggtctgctattgtactgttttccgtaataggtgtaaaatttagtgccatactatttatcctttcttagataacaattcttgtaacattctttttagttcctctacttcactctctaattttttgtagtcttctttaggtacaaactcttctggtggttggtattctatgtcctctacactcttcgagttatcttcaaatcttttattatatattacttcgttagtgttcttataatacgcatacttattactaacaaaatcaacaaagaatccatcaggtagaatagaccttgatacttttacatcaccattgttctcttcatatccacctacaatagtatatcccataatatacttattatcttttaagtgtaacacaatttcatctttaccaatgtcatactttatcatctataaaacctcttctcttaaatatatgttaaccctattactcttagtacttcaatgtgacctgtttgattgaattgtgcgactgttgtgatatttctatttccatctaggttaattgtttttgacattttagcagtgacatttatcttatcagtaatgtcacaatatccttcaaagaaatctacgctagaattagagccatcatttactaagttaaagtctctaattacaatactagatgtagtagcagggaatcttctagttgcattatgtccagaacttctagtccaatatactacgtcaataaaatcatagttatataacgaatctgatagatttactgtgtttcctgaagcaaggtcaagcgttccttcccaaaggctagtactagccatttgaactttcatggcttgccaaccattattatctttattatatgttaaagaatatttcttgcctttagtatcactaaaatccatttgtattactttatttgtagtgtttatattattatttttatacgctacttgtattgtgccttgtattgttttattactaggagttccacttatagaaccatcacagtagaaggtataaaaaccttgaggtacagacattgctaattgttgcagacttctaccattcgagctttggtaatcccatacgtatttatagtagtcattactatatgtatctacgctactgtgtgattgaagctcatctttacttgttgtctcagtccaattactccatatttcatcatattttcttttatcataagtatgagtaataaaaggagttaccgagtatgatttttctaattttggtagtgcataatacacaatagctccattattagtagaattagagcagttaaatcttagtagggctgatatataattaaccctatcattactagactcttggttatatgattgtaaagtaaaagtaaaggagaactttttccactccgtagataagtcataatagttaacctctctcctacctcctgtgtatgggttattgtcttgataaacataattatacccagcaatctcaaagtaggggaaattaccatttaacaaattagggtcatttactttaatataaacagacattgtaacagtatcccctacatatagttcgtctcctattctaaatcgttttgacataactgtaggatatgattcccctccatcatctaattgaatagtattttcacccatatatctaactgttgaggtagatgcattattagtaaaaccccaaaaagatgtattatctatataatccgttcttatattagctacatccgtcattggtaatgtgaataaactatctcttaataagttaggttgttggtcttggcgtggtaactttctaatcattttaaatgttgaagtagaattaataggattaaattcagctaaagctgaggtaccatttttactttccttataatttatccatcctgtgtttaaattacttttagggggatttatgagtgttgcaaattgagttgtggactctgttaaattttttacattaattgtatttcctgaatcgtataatgtaccttcatctagtttaaaactaacccaatcatagacagtaccattataataagttttcacaaacaatttatttgtgttagatggggcataatataacttataataagtactaccctttttatctaagtgtaaaaaccctatattacttacaccttgcggggtgtttcttgcttgtgttacaaagtagtcacctgagtcttgtatgaaatttaaaacattatttaaatcaggataactaatcgtttttaaatcagataagttaacttcttcttttaagtatttacccatttcatttactttagggtacatatcctttaatctttgtgattctgttagaggtgtgtagttaaacgtcatgtgtgtaatcacctttcaattttttaagctcatcaataagctcattaacttcttgtagtttatctttatatgtttgttccatttcttttatagctttttcttctacagtaggaataaagagtttagcttgtgagtaagggtctctatattctgtaggcataatatcacttccttagttaaataaaaagagggtatgaaaccctctttaaacttactcatctcttgttgtaaccataagtctacgtacacgaggtcttaagaaactattttcagttgataagtctaatcttacttgtaatttgttattcttagtagagtgatttactttctcatcaataacatatctattaaagtctctattagccttaactacctgagcagacttagtaaatgttttccaagttttaccatcatcgtctgaatacttaggaataacattagtgcccttaggtaagaatgcttcataactaaatcttattgtgttgtatggagcttctgtcatatcaatagctctaccgatatatgaaccttttaactcagttaagaatgtagtaaacgttaagtcattagaacttaataaaggtgaaatatacttattagactcaaatgtagcttttaatttaacttgtttagctaaacctaatacctctaaatcttggtagttaccaataggttcccattttaattggtcaaatgtagtagatgtagccatgccatctaaaatcattttaatttcccaagtacaacctgttctttcaggagttaagtacgtagacattaaaactaatctatctgctgatacattcttaataggttcaaattcaattgtagctgtttcattaaacttagaagtatatacaccaaattttaaatctgaattttggtgtggagtccaagtactagcgttagatgaactaaatagaacgccttgtacatatggattaccgctaataacttcattaggtttatcaatcttaggttttgttcttgttccgacccacatagtataatcactattttctgtaataatgacaatagcatactctttacctgcttcagccatcatagggtcatcaaagtatactctagtttcagcactagcattattagatactttaatatcatctgagttgattactgtttcagcatataccgtcttgttagggtaacctgtatctcccataccacgaatttgtacagttacattactagacttatctcctttactagcaaagtataaacctaaagaactaatagttctactttcatcatattggaatgattgtgctaatgggtctactaagtttactgtaacacgtgttttgataataacatcttgtacagtcttcttacgtccttgagctgtatatgttgtagcacttgtagagttagcatttttcaatgttacttctctattaccgcaacgaatacctgctggaattgtaaatgtacctttagctgtgcctttagcatcagacataattgtaccatcttcagaaccttttctataacctgttgctggtgtaatagcacaacgaacaccatcaaataaaatatacaaattattatcattaggatttaaaccattaacttcgaaagatacgtcacgaacacgaataaattcaatcatttcttcaagtgtacgctgtcctccagcctctaatagagtacctgttctaccatgttctctatcatatgcgtatgacttacctttccactcttgtcctttatctaactgtaagttagaatataagtaatgttctgtttctccataataactttcattatgtctccagaatcttttcattgttacttttttagttttctgttctgtgattgttacattctgagtatctatccagttatcttcactaggagttaattttaacacaccttgtttatttggtatattataagggtttacatttaaagtttctgatgcttgtccttggtaaattgtacgctcttctgtaaatggtgcggaaattagtcgaccccatacatgagctgtagtgtctccttgaataatcttaggttggtttacagcttccttataggctaaagtagcctccgcatcatcaaaactaaacacaataccaaagtcagggtgtgtaatatcagctttatctaaagatataaaaccttcactaaatacagaacgtaatgttaatgggttttgtttttccattgcgccatcatccaaagcattaacagcttggttatactctaaattatctactctagtttttactttttgtaagtcttccatagataatctagtaatagcatatgaaatacatactgcttcgttagaatcaggtaatactgttacagtacctaattgtaagttctcagggtctgtatttaaaggtggtgttactaatctcataatattaggttcacctttaagaatagcaatatcaccaaacttattaataaaaacagcatctttacgagctaagtagtaagtatagtctacaagtacaacactttggtcaataggcttagtaccattaacaggtgtgaaattaatagaccagcgtttacctactccctcacctactgtagatacttcataatctttacctacttccatctttctgttgtacttatacgaaacataataagatgtacctccattaggttcttgacctgaaggagaccagtctattgtttgaccatcagtaagtctatagtcttctccttgtttgtattcttttgttgtctgacctggacttgtttctgtccatactctaactacttcaaaagctgttttattagataaatagtcttgagaatctcctgttgaacttcttgtaacacgctctttatctactaatacttgcgctgttacacgttgaacatcttttacaggggtattagctaaagtaatattatttgatgatttattaaatacagtactttcattttctgctttacctagttcccttgacttctctacactaattctagtagaaactggtttatctactttataaccttttacatatgccttaccagcatctacaacaacagatacatgattatcatcttcggcgtttccttctgaaaatagctcaaatccactaactttatatgaacccgactcatcataagtacgctctgctaatactttgttgattttatccatctcagcattagtagattggatatagaggtctccatccataaaagtataaatagtagcagaagtagggtcattgactgttaaagataacttctcttctagacggtctgcacccttagaaaaataactaggaactccgcttgtttggtctaataagctattatcttcatcaggtgtaataattctttctgttagtttaatacctactgtttctttacctacacccgtaattttaacagtgtcttcactactatagtaacgtatcttaccatttatatacacataacctgggttaacttgtagtacattatctttagttaatgtaaaacctaatcctgattgtttatccccatctttaaaaatagaatcccctaaattttttaagtaatattgttcaatagactgcatttcatttagttctgattgttgtagtggtctatctggattaaatagtactcttgttctatcttttgtagggtcaaatctatctaagtatggagaacttttaaaattaattgccatatatattcaattctcctttttaaacttcaatgataaagcgctcttttacagttgtttgttcacttctattttggaactgtttattatcataaaataataaagttcctgtagattgcacttcactaggtagtaagttaaatttagaaatactatctttagctaacaaatccataacaaatcctacttgtctatatgtacctaagggtaactcatccccaacaatactactttctaagtacacccacttagcaccttcagcaactgcattagctgagtcaatttctacccatcgtttattaccatatgtaatttcttttttactttcatcacccgttgtttttgcaggtctaactaatgctaccttagttgcttttttatatccgataacttcttgtaatgatgttgctgtttcttcaggttgaggtgggcttgtttcattagcccacgctgtacttttaccaattgttaaataaatagaatcagccttacttacaatgtatttagctaactctacatgtgaagcatttgttgctatagccatattttttattcctttcatgtctagtattctgtattaatataacaaggtatactataatacgcataccttactatatcatattaatactttattgtcaatatctttactgtacttctgtgtacgtatctattactttaattttattatctactgtgaatgtatcacttgatagtaacatatcccgtaagtcataaataaatctatttgaacctaatgtaatattctcgttatatagagtagtagacgttagcaatctatctacatcagtatatccttggtatatcttaggtgctaattttattacctgtcctgttgaactatcaaatacattaccttcactatcagtaagtatgctcatgctacttaatgtagtgttatatatcatatctacctcttgccacacagcattgaaatagttattactcatgttagaaatactaccttttttatttgttaaattattcaggttagcattccatatagttttaagtataaccctagagaaaggtgtaatacttgaataatctattgtttctaagccatataaatctactaagttattaggtgttattgtttcaccttgacttaaattacttattgtttttaggtttgtccaattatccccatagtaagaataacttagcttaatatttttaagaggtgttgttgtatttattcctattgtttgtatatctgttaatatgttatcaaacacaatagctttgtctataacattagttacatcttcaggtgctaccgtgtagtccttcttagtagctccttcttttaattgaaggtttgttacttttaccatattagaagcaataggtgttttagaggcagtaccatctgctgtatatctacctgtgtaaacaacaagtctatggtctgtaattgtaggtgctgtaaatgtgatagatacctcaatcttattacctatctttctttgcatgcttttaacaccattagcaacaatacctttagtactactatataaatatataccatgattgtcagaatatgtttttaagtccatattagcatctgtgatttccatctcgaatgacaaagtatataatttttgtggttctagtactttagataaatacgttgaattatataaggtgtcagcccatgatgagatataaaactcttttgtgcttacaacacccttgaatatattactatcacctttatatgattgcaataagtttctattagttgtatttttatataaatctataggtgtattattttgtacctcattattgctgtttttacctgtaatacttacaataggtttagttgaatcataagtagcatgtaaccttaaatattttatgggttgatatccatttttattaattatgtctccatttaataatgatgctactttaaagccttcaatataagtatctttagtcaaatctatgtagttttcaactagtgccttaaaaggtttgatagtatacacatcttttttataattataaaaatgtaaatccatgtagttaatacttatatctttttgctcatctttacctatattaacctctaatcttgtaaataaattaaggtcatcatttaagtaatctcttatataacctatgtttacacctatgtttttctcgtaaaaagatagttctgtttctgatacagttaaccattcattagtacgaaaatcaaatatttgtaacttaataggtaatgattcatcaggtgaaactaaagcttttgcaaagaaatcaattgttagttctcctataaaatcggatatttgttttttagcattatctctagttatatctatattaggtttgtatctactgataaactcacttacattaaagttattgtataaataagatacaccataagcagtttccattgatatatttatatcattagtattctttaaggatgtatataagtaataatctaaaggtgcttcttttcctttatcatttaaagaagctatatgtgtgacggctgatgtactagtaggttcatatgcatatgtcgtaacataagcataatttataaatctacgtccaatattagaagagcctgatagaatatcttcactatttaatgtactcttatttgttctgaaccttgttttatcagattgttcagctgttgcttcactcatgtttaaatgtccatagaaagtttcatcataacctaataatctatctaaatccgtatatgtttcaattttaggtagatttttaagccatttaacaacaccatcaccctttatggtagtagcaccatcataagttaaatataacttaacacctgcgggtttaaattcatttattacatctataatctctaaaggaaagtaaccatcaacagaaacatttatcacagcaaatctataataataacccattaaataatcttcaccatttaattttgatttattggtataaaatatatttttaaaaggttcatatacactaacatttatattctcattatctaagtaatctttaatagcactaataatagcgttgttagtacctctttttaataataagtattttataattctttttctatagctgtcatcattctcatttattcttctgtatacaccaaaccaatccccaaacttatctaagtaatctcctgtggcagtttttaatgatgattgaagtttgcttttaatggtgtctgactctatattgttcatctcatcattaagtgctgttattaaagcatagttagggtcttggttatctttattattcttatttcttattaataaagggtgtaaatttcttaaaaaattagccattgtttaccccctatattaattctaccttaatatcccctgctctaataatacctttcgaagatacttctatatttgtagataaattcttaaatgctacatcataaattaaattatcatctatattcataataacttgaattaaatcgttaataattaagtcatcagaagtagtcagactatttaggtatcctctaataacactttcaatatgtctttgtaatgtatcacctatcctagctttattagatattgttactactgcagacacatctatttcctctttctctacgcctacaacatctaactttataccactaggtctgtaatcttctaatgccgttattatgtcattttttagagtagcagataaatttccgtttttatcatgcgcatatacagtaacatgacctacttcttcataaacataaacaccatcaacatcaggtacttgtaatgtaccatatctaatagatttattagtagctcttcctctcgattctacaaacatatggaacctacgtttaaaatcctcttgagattcttcttttgttcctgtattaaaggaagtcgggtttgtaattgtacgaattaaactagagcctgaggctattgtattaatgatatcttcaggtatattacctacaataccaacttctttacagtaaacttctactgtaatttcagtggttccttcttcagcatagtaatcaactaatgtttcaaactgttgagggtattcttgcctagtagatgagaatgtagtacctgcaggtatatacattctcatgtctaaaggttggtaaaattgaatgtttacattaccataagcacgcttagcttttcttttttgaaaatcaaaagcttcaataatcccttcttgaatgccccaattaatgttttctcttgttaatatataatactgttctatttctaaagctactgcttctaaaagagagcgtacagctgaaccaggtgtaaagtctgttattttgcttgtaccttgtatcgtcttatccattaacctagataatatctgtgttaactttcttgttctcatataaatttcctttcttagtcaaataaagcaaagacacctgaatcatcttgacctaatacaaagtctatagattcttctacggacttgatttctacattaaatgacccatagtattcattaccttttatctcccaaccttttaagttagctgatttaactctactatctgatgttagagtctttaatacatctacttcaattaacgtagcttgttcaggtatatttaaaccaaataaattatgaatgttagaaccatattcaggatgtaataataaagaacctttaggtgtcaatagtctagctcttaaagattgcttaatgttatctatgcctttaactatatcaaggtctcctctaccatctgaagatagggctaatatttcatcatctgttccatgagcgtctatatactctttattatccgtcatatttaggtctctacctaaagctaattctactaatacatctttatctcttgatgttatttctttagaaaccgagtctgttaactcagcatctaaaggtataataataatatcacccttagttattaagtgttcagggttccttttcttttcttcatctgtatctacaatataaggatattgtaagttgttatgttctattaaatctaaccaataactaacatcaccataatacctttgtgatatagcttgtaaggtttcttctggttggacttcatgctttctaaatctcattataccacctcactcttaattagcggtagttgtaattccaaagagccaaaacataagtctaagtctcttaaatcgagaacaatactattgtattcttcataatcacttaagtagtcagctacatagttaacattacttctcactatagatacatctttttctgttaaatattttaagtattcaggactttctacaaagcagtttacaatagcgtaagcttccattacgatagattgcataattaaatacattctaggtgattgtaactttaaacttgtttgttctactttattaactattgtattgttgttaaatgttctttctaaagtagggatatcagtagacttaatctcttttaattttactcttgcaagttcacttagttgtatttgtggtgtataaaatttagaaacaaaaggtacttcctcatctaataagttcatatgtgtgtaagacatgtctaactctaatccatttaaaaaccttaatagtccttgtggttgaggtatataattattcattacctagatacacctccatcaccgtatcctattttaagtgccatatcatcaacagtactactaagaccgttagtattctgtctagggttatatatacctatattactcataccgtctctattaccttcagaaccacctgttcttatgccactacctcctcttaatgttcctgccgttccatatcgtgaaccactactactagaattagaagagcttttactacttttattttcaaattgtgatactatttgattattcttgtttcttgtttttcgtgcgttactatctaaatcattaacaccctcatcaactctttgtttagcattaggttttacattaccaaactcagcagatgttacggaacctctatctgcttcagcaaggttacctatcacaactaaagttatttcatatctatataacaaggattcatctttagaccttgttatttttaaaccttgcggtgctagatgtactttgtaatatttatcatcagtaaagttatagaactctatataagctcctgctacgctaccatctccaccctgcttagcgtatgcttctacttgttcttgtagttcctctattttttgttttcctgttttagtaccatctacttcttttacaggtctaaatccagtagtaccagaaaaagttattgtctctatatctttaccatagtcttcaacaataatgtctgatttagttttagttatagatgttctttgtggtgcatctatttcataactttcagggtttactttgaaacggtacatattatatttaccgcttgctgttggaaaacgtaatgcaatacgtcttattgtattctttccatctgattgaggcataacttaccacctttctatatcgtattatatcatatatagtatttaaatacaactactttctcaagtttaatataacatgacatatataaaaaagccctattaataggacttttaaacttttttaaactctaatattttatttgtttctacaccatctataccatataaaataagcttatttataatatcacttgtcatatcaccactagcatatatagataggttattattatgtgctgtatttactgtatcttgagtgatgctagtatatggtagtagtactccgtatatatttgtatatatacctttgttaatatctgtacttgttagataggaagtattatataatactggtaagttagaaaaattatttaatacttcttgtgtgattgttaaatctttaactttcaaatacacttgattcctaggtgctcttataccaattaaattatattttttcagtagttctactatgtttgcagtagttggtaaattaatactatatctaatagaatttttatatttagctaatacatcttctaaagataaaatactctcaccattcttagctgaaaatgactttatttgttgtagagtgtaatcagacacattacctttacctgttgttatagtatctaatttagaatcattaagacagactaactgattgtctttagtaacttgtgttgtcaaactcaataaatcaacattagaatttacaagtgtttgtagttgcttatctgtttgttcggatactatacctaataactcagtgttagtaggtgctaaagtagtttctaatacttctatactaaacattgtattatcttgtagtaatgtaaggttaatatcattatcttgttgtacttctactgtgaatgtatctccttgtttaacaggtataacatttgtaattatattatcgtgtgtattaccattagttatagttttgtatgtattactattcttcttgactgtaatagtttttactttatcttgtaatatatcccatttaagattaatagaaactttaactttagatacacctaacggaataacaaaagcatccttagtcttatttacaaactcagaattattaaaaactatcttattccatgtaatacgtgtaggtgtgtatggataaatagtaaggttactatctaattgcagtaatgaacctagataattactactaacactttgagaactgttattaacataggtcttacttgatttctctaataaggtattattaatgttaggtaatgtaattgtatctagagtattcaatctactttttaactcaggtatttcttggttgtatttatttatcatagtagaagcatcttcatataagcctttaaatgttttgtctctaaactcttgaaactgtgtaataataccctcagctctactacttacattagatatttgatatttcatagtcgtaacatcgctacttgccttactagaaacttctatagattttttagtctcttggattaactcctctaagttttctttacctacaccttcaagtaagtagttaatgtcatctaattctttctgtacttccttaagtctatctatagactctgtaatgctagcatctaacgtatctaaaattggcttatcatctaaatatatacctttatcattaaattcaaacatatgcttagggttttttatgtaaaacacattattatcatttataccaaactctacccatacttgcgctgagtctaataataggtcatcatcttgctttataactctataagaaccatcgtgagacatctcttgtgttgttcttttttgtgtgcttttgtctaatactgaagctcttacatcacctttttcggaaataaataaagttgtaacatgattatctccagaaccatcatcaaagtatagaccctggtgtttaaataacatgttaggtgccttttgtattctaggttctattaaatttttgttactatagtatgatggaaataagtcttggtattcagtacctgtataaaagtctgaagataaaggtttttctttatcacctgaagtaatggataagaaagatttaccattgaatgtttttatagatgtaccttcaccatctttatatgtataagttaggtcaggtaatatagaatacaaagcactactatatttataaacatcatcattactcattttaccaccctctaaaggattcgtatttatgagttggtttgcttctgtattaccatagatagctagtataatagggtaattaatgtcatcattaataaatcctaacagtacagtagttccttccgttattaaagtattactgccatacatgctaccttcaggtgttctccctacataatctttaggataaggaacagctaacttaccgtcatcactagggttacgtcctagtgttaaactatttattttaacttctacagtttggtacttataatttattttgcttactgtacctaataatagacccttaacattaagttcttcagagtctatcttttttaaacttctacctaaagaagactgtaatcttaccaccatgttatatcatcctcatcaaacctcataaccctaccattaaagtcatcccaataatcgtctaactcataggtactaatagaggtgttatctttaggaaatgtacctataagagaaataaacttcttatctcctatgtatatccctatattatcatcactacgtccaaagaatagtatatcacctattttgaatttgtcaatatcaactttatatttgtgtcccttaccaaatatagtatagaagcttttacctgtgaagaagtagttaactgttaatggattttttagctctacatttctctttttatacatccaatataataagttgtatgtatctaaaggtactatatccttactttcaaaagggtttttatccgtattccctttaaacatatactgtatatgtttataattatttaaattctctttcaagtctaatgttactaatgtactaactggaacatcttcatcaaatatatgctcattctccatgtagctaccatacagtatgttctgtaactcatcaaagtaatctataacaagtacaccatttctttctaccatatgtaccatacaagttgataatgcatcagtaggtactgtgagattatcagtagtataacttatttttctaagtgtgagtttagcttctatatctgtaccattattagtaaaactatcatatgttacttgtctaggtgttatactttgtataacacctacatatggtctaatataaacaactttattatatacgtcttctgtagttatctttttaacttccttatctttttcttcaaccttttctttggttaatacttcaaaattgaaaagattatctataaatttatctataacatctttaacttgtttatccgttgccatatcaattatcctttatcatatataaattgagcacctttacctattgctgaactcatgtctattgttcttgtaccatagccattaggagttgcataattatgttctgatataaatatactagcgccaccgtctaatactttttctacaaaagcaacatgtccatactgagggcttccgccaggagcgcctctctgccatataacacaagctccttgtttaggtgttctacctacactataaccagcacttttagcaccgccaatccaatccgccgcgtctccccataacggaacaggaatacctaactcaccacgtctattataagcataccatgtacattgatatttgtaatgcctgtttcctggttgaacaaaatttgggtcgtgtttaggcaacttaccattatatttttctagtgaagctaaggtacctccatcttgtgcgcctccgtcagaatctccatctttatttccttttgttttcttctcggctacacctttttcttttaattctttagatgtctcttcacccataagaccacccataaagtcagatgactgattccatagtcctttaaacctatgtttgcttccttcaccatcttttataatagcatcttttagtcctcttgttactcctattgtagtaaagtatccttgtttataatcaaacttatgttctatggactctatgtaaaactcccatatatcccctcgttgtttatcttttataaataaccgtttacctaggtcatacttagggtcacctaatacaacaatattacctgcataaaaattagggtttgagtgataccaattaaatagcattttagtaaatataattaaagggtcatcacttgcgtcagaacctgtatctctagcaacattagctactccttctacggctttaagatacttatcataaatatcacctgtggtacttgtaggtgggttacctttaaatctagtgtaatcctctagtagtttcttagcatgtgtaggattaccatatttataattctttgtaatatcatctattacagcttttgttgttttcttatttaaatctttatcatcaaaagtttcttttttattaaacttttccgctaatatagactttaatttttcttttgttaactttggtctagtatcagatactgattctcttgaagtattattctttgttatcttttcataatcttctttacttaaattacctttttttatgtaagactctaaaatactctttacttcaggtttagtaatattgttgtactttgatgatatcttactagagtatttatctaatcctttagatatggactctctaccatagttatttaaatctttaagtagtctgtcataagttactcgttcatgaccattatctccacctgtagtttcactatcttctgtagcactaccactcttagttcctatgtataggttttctgtttcatatttagaatacccgtatctatctactaattcttggtggaattgaggtttagagaatacatcccctgttaattcttttaacatacctgctggttttactgtaaagatagagtaggtttctacatcactcttacctacatcctcctctataaaatcatcagttggtacaactatgtattctagtgctttccattcagttggattaaaaggagtttttcttaatactagctgtgctttacctttatgtttatctgaatttctaaagaataactcattaaaaggtctagcagttactaagtccataagttgttttaatgtaccatcgaagttagtaaaagcggaaacttcagttaacttttcatactcatcccaactagataaatcatcatactctaagtaactctctaatgtgttgtatgttttatccgtataattgtacttcatgtaaggaataaatcgttgtataataccttgcattacatctttagcggaactacctgtaaatttaacctgattctctccatcgccatcaactaaccaaccaacagttggtaatacagcttgtacctcttgaataacacctaaaccaaacttcataaaaggttttacaaatgattgacctgttattctaaattgtacttggtcattaccataactacctactttagatacttgagataccatacctacttgtataagtttctcttggtttccctctttatctttatggtcattattaggcgtaatatatatcttaataatatcatttgccattactagcttatcccaatacgtatcccctgccatagttatttggaatacagcactatcatcttccatagcattcttagtttgaaaactaagtaactttgaagcaaattgattgccgttgtaatctttagtatcttcaaactttaatgtaaatgtattatcatctgttactatttctattcgtatcttaggacgtctaattctatacatacttgtacttcctttttctttatataaagggtagtacttaataatactaccctagtaattacgtttatatgtgtttgagaaaatatctaagtcatctccaaaagtagacttaatgcctttacctatttcttcagcatcccttttgtcatttgttcctgtaatgctaacattcacagatacattattttgagatgcagtacttcctgaagcactactaagtatcgggtttcttaatacggacgtatatgatgatggtatagctccaccgccaccgccaccgccacctgacttaccgtatttgcttacataacttttagcgttatttactcgagtactcatcatagcctctccagcacccatacgctcaaaaccttgtgcaaaagcttttgtatttttttctaaactaccacttttactccatcctgcatttttaagcatatcactattttgaccagaactcatttctttccataagaaatctaactgtgcgtctaagtcattagacttcttacctttagatttagcaaagctatcaaggtctgatttcctactacctaaccattgtgcaatgccaaaagcaccactagaggcgttctttgcattagggtcaagccctgattcttgcttaaggttacccataacggcacctacttggttatcggataaacctttacctttaaggaatttgtaaatcttacccgcaccttctccatctacatcggaagctgaaccccctgagtcagaactactgtctgaacctcctgagtctagcgctttagcatcttctataatttgttgtgctctatctaataggttactgtaagtttttaagtttttagtttctgatttattattcttttctcttagttgttctgtagacattttctgttttttattatttataccatttgttaaaatatataagtattataattgtattctaaaaattagattctaataattgttttaattttctacctattgctttccctgtttcattagggtttttacttttaggtacttctatgttatatttaagattctttggttgatggtcgttttttagagcatgtctaggcataacatcactgcctccacctccgccacctatgaacttgtctgaacctttcataatactggcaatcatagtatcccaattacctgctgttgcatattcatgaacaccattgttgtgtctcatatcgtgtaagttcttttgtcctttgttgtagaagttgtctctaatccatttagcaccaccaacaatacccaaaccatagttaaaaccattattaggattgttatcaaaagcacctataccgaaccagttacctttgttagggtctcctcctttggaaagatttgatgttccccagcctgtctcaacagcactatgtgctactaaataccttgggtcaagtcctgactctttacctgctttcatataaagctcacctaaaccacgcattttagaattactaggtgcttgagactcaatccatttatttaacatttcggcgtttacacctttagcagttttacctaagtcatgcttagttacgtctttatccgtaaagtttttaccatcaaggtagtcaagtgttcctcctgatgaactgtcgttagaactactacctttatttgttaggttatctgctaaatggtctaagaaatgtgagtatactgttacatttccttctctagaatcattattcttttctcttttttcttctgctttttgcctgtctttactttgtgatttatcattaataccataagttaaaacatataaacaatagtatactttcatatataacctatcgtattagttatgtatatttatttaataacaagtttaccttacaaaataagaaaggtttatatgcagaagtagaatacaaattttaattatttatatattttaacaatgtttaaatatacacgctactgtatattctctagttatttctagacactacctttcggtacgtgcgcagactatttgttatccctattagtatagggtgagtatttttcttccaccaatcacttgtggctttacttccgtcacctatacagaatagtcgttgaacgtgttccgtagacctttcaggtctttaggactttcgatgctatacacccattgtacttctccttaggatttaaccttagagtatctaactaattttttctgatttctcaacattcaagcttagtctttcgacttactttgtagtttagttagctttagtagtttcatagcagttaacactcggtacttacagattgctctataagcaaggcaattagtatataactaattatgttaccttttttatttttcactgtctcgtctaatttagaagggttatctggtgtgaagaaatctgttatgccaccccatagtttacctacaggagagtcttggaatttattcttaccatctttatctccattagaccataatttccaaccatcacttgtcatagaaccttccgctgttttcgtagcataatctcttaagccatctccatagcctaaatttaacgggtctataatacttcctatagtattaccaaatttagaagaagcttctttagtatctccttgtattaaagaactacctatatcaaacgccgatagacctgcaccaatccaacctagcttacttgtaagaccacctagtttaccaagacctcctgcgttagcagtaggtgcttgtgacataaaacctaagtcagaacctttaccgctaaatttacctttagctttaccaaaagctcccttacctttgttccatgcacctttacctaggtctttggttcttcccatatattcaccaaaagtaaaatctctttttccaaaggtatcaaataaggttttacccatgcctttagcagtttgtcctgctccttttgcttggtctttaaatggtcggtctccacctctagggttatcacctagtatagtgtcagctaagtttttaagtcctccaaagcgtccaccaccgttaggattaccaccaggtttaccaccaccagtcttacctgttgaacctcctttacggttattaaaccaatcttttagtcctttttgacctttacctaataaagaaccaccagccatcatggcagtagatttagctaaagatgctacaaaggcaagtactgctcctgaagctaggtataaaggagctggcaagcttgccatagcactatgaacatctctaataggttgagctaagtcataaatatcctcagctttatcatctgtcttagctttgttatggtcatttctacctgctttagactcggaatacttatccttatttttatctcctgctttagagccttcttgttccatgctcttagctttactagctaactcttctttagatagtttacctgaggcgtaaagattgtacaactcatctgtttgctcttgtgttaagttagctcccatgctttcaaagccttttttagctatggcttgtttttcttttgttgtacttcctatattattagcttggtcaaatatattaactaagttattagggtctgatatacctttatccatttgtgcttgtaagtcatgcataccttctaatccttggtacttagtaccccatcccattgctaatctagtataagaattacccataccatttttaataccttggtcaatactacttaaggcttgagctccttgtgcaccttgtagacctttactacctgtacccgctacttgagcttgtagagaagtaagattagacatttctcctttagataatgttctaccttgtcctgactgctcggcaatagtacttaaagctcttaattgctcgtcttgtctaccaaccatatcagattcacgtataccacctaagaaagcatcttgcatagctttcatattatctgagtttacgccacctgtatgcataagttgtgacatggattgctgataagcttcttggtcttgtatacctaatgaacgaccacctacagctaactgtttagctcctttatacgtatctgcatcgcttttatgtcctatagaactttcatatgacgtagccatttttagcatgtcagttgaattataaccaagcttattatctattgacaaatctccatatgtatttcttactgcgtctatatccatattatctgaattttgtcctaatgatgttaccataggtctatttgcctcggataaggaggcacctttcatatacataccacctgcaagagcagttactgccatagtagcatgtgcaccaatagatggtaatctatcttggaacaatttacccattgttcctcgttgctgttctatctcacgctgagcaaactgttttttagcactatttttatagtagttgattgacttgtctaattcagcacctgtttttctataaacttcagaaagcttttcactttcatcaatcatcattttaatagaagctgattgttttttataatcctcagaacttatttcaccacgagctcttttgcctactaaatcttgttgttgttgtctataacctctatatctatcttggttttcttttattcttctattgttagcttctcgttgcttttcaaaagtgtctactttacctaattcagaacgtactctagcaccttggtcataggacattctattagagccttcagacctagatatatgacctctaaccatattacgattagctcttagttgctttgtgtactccttagctgaactggcatcttttactaatttattatactcttctgtaacttggttcagtgttttcatttcttttattctgtttgttatatctgagtctgaaccaatcttttgagatgctactttctctagttctgtttgtgtattatttagtgtcttattaagtttactatatactttctctacttcagggtcaggagctataccctttgtaatattatctgtttgtatgtcatttaaagctttctttaggtcgtttatattcttagttacattctgtgtagaactaatagcctcatccatagcttttggtgatattaaagacttatcactttgtttatccataatgttttgtacagattttacttcttttgctattacttttaatttctctaagaagtttgttaatggtgcatctatgtttttagactctaacgcatccatgtacatctctatagcttttaaactttgttctaagctagaactatcaccagtcaagaccaacctataatcgtcattcattgccaaacagtattcaccacctaatcaaaaaataagggtattggtgttataccattaccctacatgtaccaatcatctacatcttctattgctttgtttatatcttcttgtgttgtttctttgttatcaatacctaaactttcatcaagctctttttgtttttgtcttatgtgttccatcatagctaaatgttgagttgttaatccctcggtttcatcttctaactcagcttcaactcgtctatctctttctatcttttctttctcacttaaacttttatctacttgtgtatttaaatcatctaagtctaagaaatcaggaacaacatcaaattcatctgtcggcgcttcgaaccatgatgtgtctacgtcttccgctttcatatcatagtttttaccgtctctagcttccatcatttcttttgtatctaaattcatgttagctataataaactctatttgatagtcatctaaatctttaaaacgttgttcggtaggtagcacattaaactcacgcatgatagcccataagtttcttgataaaggctctctagctatatgtgaaagtccacctaaccgttctatatcttcatttaacttctttacgttactagtaacgaaaggacgtcataaagtctaaccaatcatcccacataatagcaagtggagttaggttataaatctcttcagggtctctaaattctttaggtacttctacccctacttcttgtagagtagctaacatctgataagcattaataacttggtcagattgataagcatccattccacctaagtatgcagaacgtaaagccatgatattaccttgttctctagcattaggtaatctaatttttactttgaattttaaatctaattcttcaaagttgtattctttctcccatacatcattaacacctttaattactttgttaataacacgctctttatcttttcgttgctgatattttaactcatcaatttcttcaggtgtcatatctttaatatctttttgttctttttccaattctttatccatcctttattattttctcataattaatataacagctaacttatgttttttatacacatacagtataacataatgtggttataactccaaattacttaacatattcagctactcttttttcaatttcttgtaacctttgttcaattgtttcactatttttaagtaagtaaatgtagtaatcttgaagtgagtcataatattcaaaatcaatcgtcaaaatctcttgaccctcaaaatactttttagtgattttacctgcttgttccgttaaggttttaaacttgtcaagaatttgattgattgcaatagcagttgtcttacttgttaaatctacattctgtgggaatttatgtaactcaattttcatttcttcatggatagctcttaatttatttgtcattttttattctcctctttattaatgtaaccttagtatatattatgtatttacttatgtcaatactttatttttaaatttttatcataataatcatttaaatttaatgttttgtggttatctgtgactctgttatagtacatagttacaacttcacctgtttcaacttctataactaaatattggtaagataatttattatttacttttactacataagggtgtctaacaactaccctacgttgtattttgttattgtataatgtttcattatattctataatatctaagttcttattatgtatataatgaacaaacgctttaaaatttactggtttcttacatttacctttgaagtgatttgttaacttaaagtaattatttttattataagcctcttttagtaagttcctacatataattatttcttgattagtcatttgtttataatgcttctttacttgcctgtttttacttgttgttcttctgcctgaataaaaagttttcacagttcatcatctccttatataactatagtattacagttatttataattgtcaatacctttatgcttattttttctagaatattttgttttatcttttttaattcttgttgttggtttaattttccatgttgcccttgaattacttactttacctattgttttccttttgtttgtcaatatagtacctccttatttatttataattttgtatatagtcaatataacttatactctttagtgtatcctctttttcctgttctgtagcttctctaatattgtaccctttaacagtgtttcttttacccttggcacaatctacaatggatgctacatctgaatttattctttttgtcatcatatgcaaaggcaactgaataacttctgaacttttagttgctacatatactttaattcttttatctgttattgttttagccttttctgaaaagtcttcatcttcatatctccaaagataaccacatgattgctttttacttcctgatacacaccctctaatacttgatgaaggtaatcctaaattgctaaagtatccttgtgcttcttttaaagtgtcgaatctgatttcttctagtgtcttaatatttaatcctactacaggtttaaatcttttcttaacccctctacgtttcattaaacctttaacattaccaacactcatactaaatttatttgcagtttcttctgaagagtgttctttataaaattctataatctctttttcattttctttatattttgtaaacagttctattctctcagtataatttaaattaatttctaagaacgaacttatagtatttaatatgtcctttttgtcctcattaggataatagatatatagtaactttatgttattatctttacagtatttttcttttagtgaatctagctcttgtatcttttctaagggcgtactccatgttccagtagcttgtttaatatgttgttgccccatatattcaatagcatatttattaccatttaattctatataaaaatctaatctttgtggtctctttaatcctgtgtagatagatttttcacatataaattcaataacattctctttaagtatagtctgtataattctctctccaatacttttcatatggtcttgagggcaattattattagtattgttctcaaaactattccatataacatcccatgtatttccttgtggggataataataaacatctctttgttgattgcaaattttcaggatagtttataatatcataccctctacttttagcgtaagaagaaaaatatttctttttaccttcttctgtaagttgtggtagtcttatttgttttaagttatttaagttattataagacacataacattcacaacctttaaatttaccttccaaaacaacacctaaatgttttgtatcttttgctctacccctatattctactatttttatatttttttcttttgctaatttttcaatttccatattaaaacacctcttatattaaagtatatactaatgatactatatcattagtcttttgtcaatagaaaagacctaacttttattgttaggtctgtattctataataaatacgaacttatgttctagccttatctgatgcggtcaagtacgaaaacgatttatttatttacaaacgctactttgtaaacctgtgttatttcacatgcactagctttcactacgtgactagactatttgttatccctaattagtagggcaaggatttttcttctcccaatagcttggagctttactctcatcttataatgagatagtcgttgaacgttcctcttatgatttactatcacttagagtattcgatgctatacacccattgtacttctccttaggatttaaccttagagtatctcaatcattttttctactttcgtaaccttctagtttattgtttccaattcctatgtggttgattgagctttagtagtttcatagcagttaacccttaatactcacagattactctatgagcagagtgtaagtttctcaatttcttcggttacgatttcattggtagtccagctttcattcactcgtattcgataaaggtcgttactctttacccgttcttctatgaactgctttatgtttccataaagattagactatatcatagtcctcaaaagaggactcttttcttttccacttagcaaggttttatatggtaattacccaacaccttgaccacttggctgtacacttactccctttactattgtaaataggtttcagttagtcgtttggcatttacaagttcataacttgatttagcacaagattcccttattacgatgtaacttagggttccctgtttagaaaagtttttcgactagaattacttctagaagctacaaattgattttatagttattagccgaacatccgtggtaactaataataacttgtttcgttaagttatctactactaagatatcaataatatctttcttaagaatttcttcaccaagtgaagcatatcctaaatctgcgaagttttcttttttcatacgtaaacgttctagtgtaattgtaccagcatattttaagtaaacatgctcttgtggcataatactaccaatttcgtatacaccagtagttccgtattcacgttgacctttagcagattgtgctcttccaactggtttaccttttaccattagcataacggtattaccagtatggacagactgcttagcctctgaagccatattaattcactctcctattaaatttaataggagtacctaaactaggtactccttgtcctagtttaggctcttaatgtttgttgttggtataccaagctaacagaaattttcttgaagcttctgatagggtatacaaccattgagattctagcttcattaccctcgacaataacttgtacgtcttcaggtgggaagtcttgaatttcgttatctcgtttcttgcgtcctaagaatgactgtacaaagtctttgataattgaagcacttgtattgatagtacgagtaccaataaagttattttcaagctcaagttttaactcagaacataagaagtcatttgcttccccaacagccatttctgacttaacagggtcatttttatcattaaatgtcgtaacatcgtctgttaatctaaagaatgtattagctctattacgaacatattgtacggtgataataccgttttcatttaactcatctaagtctaatgattcatataattggtctacattattaatacgtagttgcttaaaggtaatagactcacctatagctaaaccacttaccaaacctccgatagcagaagctaccatataagctggtacatgtaacttacgaccattgtccattgtgaatatacctgagttagctactaaagcaactcgtgggctagataatgatgattgacgaccaaataattgttctttcgtttcattaaatcctccacctagaatagcacgcataggttcacctgcatcagaacgttctttaacaaaagaagctacttctgcatgaacagattgtttagaggatagtggtaccatgtagtatccaccttcatgtgcaaatttttcgattttatccgaccatgtagcaggaggttcaccatttgtaccacctgaaagttttgttaattcaaaaggtgtgatttcttgaattggggacacagctgttacagtagcagattcttcatgtgcgtctacttctacgtttttaggtgcttgttcagatactaatcgttcaaatgaaacaagtccgttataggctgtttgtttctctaaatcaccaaatactgcttttacatactcagctttatccttaatgttaacatctgtcatagggtctaataagtaagactctaagttcttatctccaaaaggtgataacttagcttcaaaatcaggtaattggttaatatcgttaatgatggcattagtagtagcgtaagctcctcctgttaagtcataagacttaacttctgtgctattagcttttaatactaatctttttgctttttgtgtctctttatcgtgctctacagaaaaagtagctgtactttcactacctttatatttgatagtgaagatattaccaatattatcatatgtttcattaaatctatcatcttggaagattaaatgtaaacgtaatgaattactgattgtatttttttctaatcctacttgaatgttgttagctacgttaccataaatctgtgaagtaactttcaatccgcctacttcagctgtagctggtttagcatcctctacacgcatagcaaaaatcttacctgctgtgtattgtggattagaaccccaagctaattcaattgcatcaagtaattcacctgagcggaatagtcttttagcttgtgcgtagtttcttaattcatatacggtatcaggtttaccaccttcagcttgtccaattaaacataaaatcttttcactggagctagctgatttaccgatacctgtactgtctacattaatgactgcatgtggacgagtgacaggtcttcgtggaaacggttcaactgccatgtataattctcctatctatatattaaatttctaattctctacctaaatacttttctaaaaatggaataaagtctttttcattgaacaggtagtgtttaccttccatgtaggctttaaaacctgctacctgtgactctttcatattaaacaaggtctgtgctgtttttaaaaatgtatctatatgtacataacctgtaaaggttttacctttaggtgttttcttagccattatctttttgctcctttattcttgaaagtaatcttattaatatcttgtgttattgtataatctaaatctaatgaacttgtgtatttaattatagtaggtctaccaaagatagatgactcaccgtcttggaatataggtgcgatatctccaaatgcaagattttgtagctggaatgtttgttgttcttctatactgtctctcatagatatcaatatcatttttaatacggcatctaaacatctagcaacatctacattatacgacatacccacaattgttacttgttcttctatggtaataccttttactaaccctttactatcatttgttttttctacatatacaatatttgcgttgtagccttcataagtctcattgttagtataattaaaagatacagtgttatctgatactttaacatcatcgtaagaatcaaacgctatgtcttctactcttattacattagaaataggtttagatacatgaaatactaaacgattaccttctcttttagctactgattgttcactatatgtgttacccgaagcttctagataagacccttgtatactacctaaagagtttttaacctcttgaccttgtcctagttgtattaggtaatgagcttcgtagttgtttttaaagctagggaaattgaaccctactgttacttcgtgctttgcgttcttaccgcaaaaagcctctttgaacatttccctagtttgataatcaaagtcttttaaaacttcatctataatataacaattacttagtactgtatgtaatctgggctttatttgctctagtaaatatgagtctactgatgttattgccatcctacttccataacctttctacattaaattcttaatcttccagttcataagatttctaacatactttaatgttgttttagagaagttgttttcattaaccttatctctatttaatatccatgaacttgcaggggatttactagatactgttctaaacataaagtaactagattttttaccatttcttactttagtaattctacttgatttactagcagtatttagtgatggatgactaatattacttcgtctaccctctagataatcagtaagagtagatactgaattacttgaactgtctatttttaaagaccttaagtcttggtatgttttattattcatcttacttgtttttattcttataggcaccgttagataccaaccaccatctttagtctttttctttttagatgaatgagcaaaagctttcttaaggtctattacacctttcttctctagctttttctcagttatttgtaaataagtaggcatacgtttgacactcacattatctacttgtaatgctgtagcttgtaatctatctaaaatatcagaacgcatagcatctactgttctcttacctacatttttatagctcttgtctctaaataacttaggtctagttgcttttataggcattatagcattcccccaaagaaaccacctgaatgattatctttagattcttttttagggtcttctacctgtatctctaagtcctcttctataccatcattaactttaaatggctcaggtagtacaataacgtcttccctttttaataatagcttctgaggtaaattttcaaactttgtattaggttgattaaatttagtatattggtatcgactttcttttaatatatctgatactacatatctaagtaccattaaaatatttaaggatatagttttgttttcaaacttagcgtccatgaataatctattgttctctatattatagtcatcttcataaacattaccatcgttagatgtaataaaggttacttctttgacatcatagtatagaggtatacctttttgtatacgctctttagtaacatggtatataagttgttgtggcatcaatacttcaggaacagtaaacctgtctctataagatactcgtttttctaattgtgtagttcctatagctgtaccagtatctaaaattcctatatctaaattgttagttcctttttcttgagattggatagccattattgtctctttaggaggtaaataggcaatacctttaccgtgacacctaggacaatctactctaggatgtcctgtgtcagggttaaggcaaggacaaaagtaagccctttcccacagtacctttatacctctatcattgacaaatcttctcatatccttagtgtcaaactctagtctagctgtagataacttttgttcttgttcatctgcttgtgttgtagatgtatacatagtagacttattaattatattagaagtattattattagtacctatcataaaaggtttttgcatttaatatctccttcctactatatgcctatcatattggagccaaagtaagattttaacccagctaatagctcttttatatcttcattaatttgtagtatttgagcacttgctccaccatacatagcagattgtgtagtacctattgtttctgtaataccatctacatctagagttttgtttgctattcctgcaccgataatgagattaccatatgttaattaaattaacttcctttgtaaaataaaaggcattatacattcgggttatggaaccctactaaaagcaaacatattattggttttgttcttttaaccattgggaattatggtagttttttaaattaatacttgcatttatatccctatcttcttcatatccacaagcattacatttaaagactttatcacctaactgtaattttaaagcatttctttttctttctccgcaattactgcatatttgtgatgatggataataagtactagctactgtaaattttatacctctatcttcacatttatattgtaattgctgtctaatcatatagaaattagaaaactgtatttgttttcttttttgtcctgtatatcctttgtcttttattaaatcacgaactcttatatcctctacaataatctctttaggatacttttcaacaatttcttttgttatttcatgtacatgatttttacggatatttgacatttttctataaactttagctatcttattttctagctttaaaacattatttgttttggtgtggttaatatcatatttattacttaatcttttctgtaggtcagctaattttttttctaaccttttcattttcttggaataaataatattaccatatatttttctgttagaacaaattacgtgttttttaccactacctaagtctatacctatgacttcgttagtattatccttttctttcttgtattgattatctacttcaattgaaaaagatatataccaatatttaccatcatagtaacatttagggtttaaaggtttaatgctttcattctctagtactgatttattatttttatatgtaccattagaaattcttaagtaacctaatttttcaactttaacatgtttttctttgttaaagtgcattcggtcatatctaataggaaacctcttagattcccttttcttagacttaaatttaggttttctaatttcatgattatgatattttattaatgtttctcttaagtcatctattttaccaactaaggtttttctagatacttcatttaagaaactatacttatcatcattctttatttcttttagtatagaaatcatatttttatggtctatatatttaccgttatcgagagctttccaatatctttctagcatataattataaataaatctagaatggtttacatgtttccacattaactcttcttgttcttgggtagggtttacttttagtgttatacctctataaaatttattttccgtttttttcatttactttcaccaccttatatattatatctataatataacatatacttggggtaatttcaataggaagttttcatttaattaacattgtttccttacttacgctactaaataagtctaggtcaattcctagcactccttttcaagacgtgtgcagactatttgttatccctaagactagggtaaagatttttcttctcccaatcacttggagctttacttctgtcgtctatacagaatagtcgttgaacgtgttccgtagacctttcaggtctttaggactttcgatgctaaacttccattgctcttctccttaggatttaaccttagagtatctaactaattttttctgatttctcaacattcaagcttagtctttcgacttactttgtagtttagttagttttaggatttcttagcagttaacctttgaaaatgtgcaacttacgctacacacagggtaatatcatcgtaaccccatatttggtaaatttcttttagtgcatatttaataactaattgctctaattctggtggtacttcccatggtttagttctacctgctctttgtctaggtaacataccactaatataatctaatgtaatcatttgaggtgcaaaagttgctccacttggcgggtacattcctgctaattgaggatatccactgaatacagcatcgtaagacatagattgacccgtctgcattaaagctgtagggaataactgtacgtgacctgctaaatgctccactttccaccagttagctggataatcatacataggtctaccattaaattgtagttgtaaattttctacctgtaatataggttttttatatgcgtgtacaaacatataactattaaattctgtttcgtagtaatctctcatttcatgttgtaagtcaggtaaaatagatatatctaaagctctttccgctttacctatagctctttctaatatatgattataaaaatcatcacccataggttgtcctgtatcggggttttgtactgttataccaaacatataggctttcacagcatctgctgaccaaccataatcagctagagtaatattatctaattctcttttatctatatgttttgggtttccagatgggtgataaggatactcatatgataaagagctttcgtaagggtctaaactaccaccaaacatactgtttaccattctatcaacctacttatcttcttttttagttgtttttttagttggtttcttctcttctttttcttccttaggttttacttctttctttgttattttcttgtcttccatatgtgtaaaacctggtaaattagcaaaatctttttcttgtttagcagttagtcctttaactacgcctttatcgtctacttctacttgaccatgtacagtagccattttaatattttttaatttataagttaacattgatttttaaattcctttcttgtatactataagtagtaataaaaaaggagcaacccttaggtatactccttattctattgtattcaatttttaattgtatttactattttaatgcaaggtaacttacgtttttaatacgagcccattttttaggagcacgtaacgctaaagcaccataccataatactgcaaatgtaatactagcattaatttgagctaatggtaatttcatcattggtaataactcgaacaagtgtaatacttgtggtgacatttcaccaacgaatacgtctgctgtttcaggtaatgtttcgtttttatcaacgaatactaaagaaccatcttcttgtgcatctttaagtgctacacgtttaattaagtagtacatacctgtttctttaccttgacggtaaatagatacgaattgtgggctttgttggtacatagagttaacagtaatctttaattctactccatctgtagcatttgttactgtagcaacttgtgcttctgatggtgctgattcagcttcatcagagtgaacaactactttataagataaacctgcacggtcttcttctttagtaaatttacctttttggtttgtttttacttcagcttttactgtagctggttgtggtgcatttggttgtgggattaaagtttcatctaagattaattcattttccattacagtagaaccatgtaatctaatgaatccacgagatgaatagaatccgttaacactgaaaccagtatttacattaccactattgtcttgcattaattgcatttgtcgacctaagatattagtaacaaagtcagaatgtacaccgataggcatgtaagcatctgtagctgtaccaaaacctttaccgattttaactgaagctaagtttaataatttctcatctaagtgagcacctttagcgtcgataacgttatcagcatcaattaatttagctagtccatcaaattctagtccttctccaccaacttcagaagttaatgaagcatcaccatagaatgaagcccattcaattgttttagcaacaactgagatagcatcttcagtcaagatttgaccagggtcagcaatgttatttactaaactagatgccaatgacatatttttagtatcagaaatgtatttcattgtaacggtcttttgacggatattagggtctgaaactgacgctactccgatttcacgtacaaaacgagaatgacctactttaccgtgacgtaagaaaacatcatatttaattactgttgattcagctggtctacgtgcaacatcacggtaaaatactaaatcattatttccccatgtaagcatagtgatttggtcgtctaaaatttcacgacgtaaagcacctgcatccacttgtgtttcaggagtgataccatatccagtttggaaggatttcgataatttttcttgtaattcatcagcaactgcatgttgcttttttgaaagttcattttggttcatttatatatatcacctttcatatatgctctttttttttattgttttattttacacactataatataacacaactttgtttcttaattaaagattagcaaattcttttacaatattaaagtctttttcacttgcttgctctggattgttgcggatatttaagtaagcttgataagcattcaatacttctgaacgattcgtatgtgggttttgagatttttctttataggtactcatgaatttttcacgggcttctacagataagtctctactttcttctttaacttctacttcttgttcttctttatcttctgtagtttctgcttgttcttctgtttgtactgatttagctacataaccaactacatcttgttcattcgaagtgttattagtcgttacggatttttctactgcttcttctttatcttcttggttgctctcaactgatttagaaacttcttcattagaattaattttatcagttaaagcttgaatagatttagttacttcttctaaatctgatttagtcacatattgttcattttcttttttaatatcttggaatgatttcaagatagtacggaaaccatctacaatatctttatcagaaatagatttagatgttttttcttcctcttcttcatctttttcttcttttttgtcttttttattttttcgtttctcgttgtctttgtcttctgttttagtatcttttttatctacagggtctttcgactccttagctgacttagatacttcttcttctagattttcttcttgttcatgtgcttctttagcatcttcttcagtaacctttgcaggttcttgtggttcttctttagcttcttctacttgctcttctgtagcttctacttcatttttaatttcttctttttcttctgttttagtgtcttctgttttagtgtcttctgttttatcttcttttacttcttctttagactcttctacagattttgatacttcttctttgtctaagttatcatattcttgtagaatattttgtaattccgtaggcatataatataatcccctattctaaattttttttattaatactcataactgctatctcagcatcttttcttgatagtcctttggctaattgtaatgtaataactgattcttcataacccatattattagatttagttaagtcctctactacattattccaaatatcattatactctttaacatctttaatttttgttacataggttaaattagtaatagagcttgctaatgactctttacgtaaggctcctgcatctacttgtgtgtctggtgttgtttccgttccagtaaggaatgatttaacaaaactctcccatgtagcttcaggattagctgggttttttactagtgctacccctgtaatcataagttcatcaacaattctattgtcatttatgttacgtttcttaacagcgccttctatagaaaaccctaaacgtctaccactacctgacttttctagtttctcagctaggtctaacatttttataacattttcatcatctttccatagcttagcttctataaataaacctttttctaaatcaacataacagttatctgtaggtatacctactacattatcttgttgatgttcgtagttaatatatccattttttttaaagtattctatatcaataccttttggatttataatgtcattctgcaaatcaacagctggtgtggaagcccaaccagatacgatagaatatttatttgtatcatcttccgtatctatggatttctttaagtccataggaacaaaagcattaaatttcatttcttccaaagtgattatacacctcacttaattgttattttatatgtacatacataatataacaaaaagtatatcatcaacattattcattactacacacatagtataacatagtataaatgtagctccaaattaaaaaataacaacctaagtattaattaggttgctaatattatctacataaagtcggaagatttctcaccttttcttccttgtcctttatttgatgtttgtgttctatatacgttatcatcaccttttaactgattatctgttcctacatcttggttagttgtttcttgtttactatcatctgtaggctcatcagtttgtggttgtgtataactcataagtaattgaagtctttctttttgtttagtatctaggtattggtctttttgtatttcttgtgctgtactttgtaaaaatgctgagtcaagaattacatctccaccatctattggtttcaatccctgttcttctcttgcttcatttacagttttatatacttgtacttctttttgtaaaatactaagcttatctaactcagacttagtatctcctccaacgaattggaaagtatacttatcaccaaattcagatataatgtgtctgttaattaattcttctataaatcttaatagaggttgtaaacctttattcatagattgttgttgcttcttagcagggtctgactcattcaatgtagaaccgccttttgaccctgtggctcctcctcctctattagggaatcctatttcagaagggtctataccatacaaagcagaaataatattgattaaaaagtttaaccatttctcaaattgcatatcatttgctgttggtgtcatattaacaaacttaacatcatcagccatcatcacggggacttcgtaatctaaaatttataaaaaattttattcctttttcaacgtatccctttttgagtaccttcatcattactagttacttttatatactctactaaggtttgtatgatactctaaaggcgttaattcgggtttacggaaccctacatatcatgtttactgttttatttagttaaaacatgatatggtttaagtatatcatagaaaagattacttgtcaactagtaaaggaataattttttttataaaccttagttttatttatttacaaacgctactttgtaaacctgtgtcatttcacatgctctacctttcagtacgagactagactatttgttatccctattgtgtagggtaaggatttttcttctcccaatagcttggagctttactcccgtcttgtaacgggatagtcgttgaacgtattccatagacctttcagttctttaggactttcgatgctaaacaaccattgttcttcgtcttaggatttaaccttaacgtatctcaatatcttttttctactttcgtaacattcaagcctaccctttcgggttactttgtagtgtattgagctttaggtgttcttagcagttaacccttcatctatataaattactttatatagaggcaaatttgccagctaccgtttatacctgaaaaactagatttccattctcttttaaagttctctaacgcatgttgagattgctgttggtcagctctaatctgtaagatacctcttgttgttccaccgtgactgaagaacctatcgttaaaactttcagtattattataagctataaattctttcattgcaatctctacttctgacaatccatacccactagaatttaagtctgacctagggttcctaatacccatgacaagttctctgcttgtaaaactagctactacttgcttatctatgacctgtacaaagcgattgccacctttaattatcttaccgtttttatcagtagcataaaaaatggtgctagggtctactgcaataaacttctccatcttagttttgtttttaggactaaaaactttttcgaagttaacttggtcgtacgtataagtatctcttactatttttttacaaaactcttggaatgaatccctgtctatatctttatctgtacctgtattaagaataaattcttcaatacgtttcatctgttctttttctttaataccaggtgtagcgtctaagtcttttaatttaacttcaaaaccgactcctctttctgaatacctagcaggtttacagtatgtagatacttggttagctcttgtaataattatagcatttaatatagagttattaccaaatttctttaacacttcatgtaaattatgagcatttctcatataactcttcttatctctataatcaggatttgtatccatcatttctaaaaatggttctgcataagcttgctgtttaccatacaaagatttagtaatttcttgcatctcttttgtatcttgttctatttgtctaatgttagcttgtattccatcatctaaaggaaccataaggtcttcagtgtcttctttatacatactacctaaccttaggcttttaaataaatcaggcaactttttatttacctcctcgaatagtagttagtataacagtgttattataggtaatgtcttggatatgtttaggaatatttatctttacttcgaatggttcttctatatagtaaaacattttcttactttccataacaatatcataatcctctaacacaatattattatccttatctaccaatattactttattatcctttgtagcttctagtaccatatatttaactttatcaatagcaataaacatagctacatgtttaccacctatctgtctataataatccactacttctatccaattatctgctaatccttgaccttttataaagtcttttgcttcatcccatttatcgtcttttgaaaatagcaaatgcttcaatcctttaattttttattttttaaattcctagtatttacaatcttcataactaaaaaccaaaaactgcctattacagctccaaagaaacttataccaaaaacaattaaagggttattaaaccctacatactgctctgtattctcaatagagtctataacatcattttttataatgattgacgtggcttgaaacattgttaatactacataagaacctatagaaattatagcatatatcaagtatagaaccaacttactacttttttcagttttaatatacgcaaataccattagtgctagtagacttacacaagcaaaaactacggatatagctgtaagtacgtttaatcctatcaaaaaatcaccaactataatgtttattttattactcttttaatatagcaaaaaaaggagaggttatccctctccattagtatcattactttcatctacaggtgtgctaggttccaatggaactaaaggtatcgtagtatctgagctaggtttttcaggttctataggtttttcaggttctataggtttttcaggttctataggtttttcaggttctataggtttttcaggttctataggtttttcaggttctataggtttttcaggttctataggtttttcaggttctataggtttttcaggttctataggtttttcaggttctataggtttttcaggttctatag

SEQ ID NO: 2 - DNA, 17501 bp, Unknown
  bacteriophage strain capable of infecting bacteria of the genus Staphylococcus
aatattcatcaaatacaaaatatacatctattgacttttttcaaagttatgattttaaattaaaatctagtttcttctattaaatagtagttataaaattatttaaacttttttacgatattctattgacaaaacttttaaatgtttgttatactgttaatgtaatcaatcaaggaggttacaaaaatggaatatgtaaagcctttacagttatttattttaaaaaatggtgatgttgctgttcttttaggtgatagttcaacttatgaattaaaattatttataattaataaatattcatttatgtatttagaccataactcacctgaaaaaattattgatgatttaaggagagatgataatggttaatgttgataatgcaccagaagaaaaaggtcaagcttatactgaaatgttgcaactattcaataaactgattcagtggaatccatcttatactttcgacaatgcaattaacttagtatcggcttgccaacaactattattaaactataatagttctgttgttcaattcttaaatgatgaactaaacaacgaaactaaaccagaatctattttatcttacattgctggtgatgacgcaatagaacaatggaatatgcacaaaggattttatgaaacgtataacgtttacgttttttagaaaggagtgatataataatgaaacctgatgatattgttacattacgaattaaaggttatattcttcattatttagatgataataatgaatatatagaagaatttataccttatcacgattatcatttatcaaaacaacaagcaaaagatttaatcccacaatcatatacactattatcaactacacgacatacgaaaactatgcaagtttattacaatgatttaccacaaattgcaattgcagaaagcaaataatttaaataagaggagaaataaaaatgacaaacgtaaaagatattttatcaagacaccaaaacacattagcgagattcgaatttgaggaaaaagaaagagaatttatcaaactatcagaattagtagaaaaatacggtatgaaaaaagagtatatcgttagagcattattcacaaacaaagaatcaaaattcggtgagcaaggtgttatcgtcactgacgactataacgtaaacttaccgaatcacttaactgaattaattaaagacatgcgtcaagacgaggacgttgttaacattatcaatgctggtgaagtgcaattcacaatttatgaatatgaaaacaaaaaaggtcaaaaaggttactcaatcaactttggtcaagtatcattttaatacaatttcataggggatatttatcccctatttttatgaggtgcttaaatggaacgtaaatacaaaacggtattattatattgtgatgagattaaaggtcatttaccacatcaaatagcaatgtttgaagaattatatgacgctaaagttgtatactcgtattatgaatacaacctgttcactaaaaaatatgcgtatatgatagaatacattaaggagatatagaccatgaataacctactggatattattattattttccttttagcatttttaattacacttgtaatacttatgacaatgcatatacgtgtgtcatttggtgttttatttactacattgattatattctacattatctttttagtggttatatatgggttatatggaggtcgttagcaatggtgagacatacgtccgaaatggataaatggaaaaaagaaagagacgcaagaaaagagcaggaaaaagaattgtttttaaatgattttagtactgttaattttaaatttgatgataaagatttacaagaggcgtatatagacgcatggaaacatttcgcacatcttccttattttccaaaagaaagaaacgtgtcatatacaaatgctgtatcattggttagaggttcaagacataaaaaattaaactatatacttgaaatatataaccgtaaagatgaatctaataataaaaacgctaaaaaacataaatatgctttatatgaattacaagctaaaaataataattcttcaatgtataaatatattaaagaaattgacactttatacaaagaaattggtaaatcagacagacctatgacaactattgatgatgaagatgtgaggtataactttttatattatgcaacatttgaagactaattttaatactgtaaacgacatcataaactattacaaggagcaaaaacatggtgaaacaaaatcgtttagacatggtaagagattatcaaaatactgtcaatcatgtcagaaaaaaaataccagataactataatcaaatagaattagttgatgaactcatgaatgatgatatagactattacatatctatttcaaaccgttctgacggaaaatcgttcaactatgtttcattctttatttatttagctataaaacttgatattaaatttactttattatcacgtcattatacattacgtgacgcttatcgtgattttattgatgaaatcatagacaaaaacccactattcaaatctaagcgtgtcacattcagaagcgctagggactatttagctatcatctatcaagataaagaaattggcgtgattacagatttgaatagtgcaactgatttaaaatatcattctaactttttaaaacactaccctatcattatatatgatgaatttttagcacttgaagatgactatttaattgacgagtgggataagttaaaaacaatttatgaatcaatcgaccgtaaccatggtaatgttgattatattggcttccctaaaatgtttttattaggtaatgcggtcaacttttcaagtcctatattatccaatttaaatatatataacttattacaaaaacataaaatgaacacatcacgactttacaaaaacatttttttagaaatgcgaagaaacgattacgtaaatgaaaagcgtaacacacgggcattcaattcaaacgatgacgctatgactactggagagtttgaatttaacgaatataatttggcagatgataatttaagaaatcatatcaatcaaaacggtgattttttctatattaaaactgacgataaatatataaaaattatgtataatgttgatacatttaatgcaaatattattgttataccttatacaaaacaatatgaattttgtactaaaatcaaagatatagatgacaatgttatttatttaagagaagatatgttttataaagaaaacatggagcgttattattacaatccaagcaatttacattttgataacgcttactcaaaaaattacgttgttgataatgatagatatttatatttagatatgaataaaattataaaatttcatataaaaaatgaaatgaagaaaaatataagtgaatttgaaagaaaagaaaaaatatatgaagataactatatagagaatacaaaaaaatatcttatgagacaatatgaattataaaggtgtgtacgattatggggttactagaatgcatgcaatatcataaacatgaacgtcgaatgattttatactgggatatagaaacattagcgtacaataaagttaacggacgaaaaaaaccaaccaaatataaaaacgtaacgtattcagtagcaattggttggtttaatggttatgagattgatgtagaagtatttcctagttttgaatcgttttatgacgcattttatacgtatgtgaaacgacgtgatacaatcactaagtcaaaaacagatattatcatgattgcacataactgtaataagtatgacaaccattttttacttaaagataccatgcgttattttgataatatcacacgtgaaaatatatatttaaaatctgcagaagaaaacgaacacacactaaaaattcaagaggcaactattttagctaaaaatcaaaatgtgattttagaaaaacgtgtgaaatcgtctattaatttagacttaacaatgtttttaaatggatttaaatttaatattattgataactttatgaaaaccaatacatcaatagcaacattaggtaaaaagttgcttgacggtggttatttaacagacgaccaacttaaaacagattttaattacacgatatttgataaagataacgacatgtcagatagtgaagcctatgactatgctgtgaaatgtttttcaaaactcacacctgaacaacttacatatattcataatgacgtgattatattaggtatgtgccatattcattatagtgatatatttccaaattttgactataacaaattaacattttcattgaatattatggaatcgtatttaaataatcaaatgacgcgttttcagttactcaatcaatatcaagatattaaaatatcatatacacattaccatttccatgatatgaatttttatgactatatcaaatcattttatcgtggtggtttaaatatgtataacactaaatacataaacaaacttattgatgatccttgtttttctattgatatcaattccagttatccttatgtgatgtatcatgagaaaattccgacatggttatacttttatgaacattattcagaaccaacgttaatccctacttttttagatgatgacaattatttttcattatataagattgataaagatgtatttaacaatgatttattaattaaaatcaaatcacgtgtattacgtcaaatgattgtcaaatactataataatgataatgattacgttaatattaatacaaatacattaagaatgattcaagacattacgggtattgattgcacgcatatacgtgttaattcgtttgtgatatatgaatgtgaatactttcatgcacgtgatattatatttcaaaactattatattaaaacacaaggtaagttaaaaaacaaaataaacatgacatcaccttacgactatcatattactgatgacatcaacgaacacccatactcaaatgaggaggttatgttgtctaaagttgtactcaatggtttatatggcatacctgcgttacgttcacattttaacttattccgtttagatgataacaacgaactatataatatcattaacggttacaaaaacactgaacgtaatattttattttctacatttgtcacatcacgttcattgtataacttattagtaccattccaatacttaacggaaagtgaaattgacgacaattttatttattgcgatactgatagtttgtatatgaaatccgttgtgaaacccttgttaaaccccgatttattcgaccctattgccttaggtaaatgggatattgaaaacgaacagatagataagatgtttgtactcaaccataaaaaatatgcatatgaagtgaatggaaagattaaaatagcttccgctggtataccgaaaaacgcctttgatacaagcgtcgattttgaaacctttgtacgtgaacaattctttgacggtgcgataatagaaaacaataaaagtatctataacgaacagggtacgatatcgatttatccgtctaaaacagaaattgtatgcggtaatgtatatgatgaatattttactgatgaacttaatatgaaacgtgaatttatcttaaaagacgctagagaaaattttgatcatagtcaatttgatgatattctttatattgaaagtgacatcggttcattctcacttaatgacttatttccagttgtacgttcagtaaataataaatcaaatttaaatatattaaaaatgcaacacgatgacatcaaaaaaggcaactgttaaataacagtcgcctttttattttgagataacatgaaaaatgtgtacgaaaattgattatgttttgtattttatttactagcattactagcatgatttcattatagcatagttaattaagctataccactaaagaatacaatattatcacctgcattttctggtacaccattaatcaatgtatataatactacgcgtgacggtgccacgtacggtggtacattatagtttgcaactaagaatgaaccatcgtcaaatactgctacaacaacacctgtgtgaccaataccatatgctgttgcttgtaagtatggtggtttacttgaaaagccataaccgacagtagggttgtgcgttgttttagcacctaactttttataaacgtaccacacacgttgaccgtttgttatttgaccgtcgtctgttggttgtcttttaccatgtaattgtgacatatatgcccatgttaattctgtacattgtcctgcattacccgtttgaggaaatatgttacctggtttgtacaagtattcttttttgaataaaggtacaccaattgcttttttatatttttctggtaactgtgcatacgtccagttaccaccaatgacacgaccacttttaccatttggtttgactgatttaccactaattggtttatggtcaccgtcatcatcagtagggtttgaactaatacccccactatctacttgcacgctatcaatcagtttttttaatgaatcgagtagaccaatagtcattttaatatgatatgtgtttttaaatgttttttgtaatgtaaaataatcattactaaaaaatttgtcactacctatactgtgtacatcccattgtaatgcgtcttgtactttttttaataattcttgcatggcttgttttgctaaagcgagtagtgaactaccactgtcaccactactaccactgtcagacgaatcactaggtgatccacctttaccgtctaatttaccaccccatgctagaatagtatttgcaccgtctaaaaatggattaccatagttttgtactttattatatgatgctttcaaacctagggggtaatatgccgcccaagtagctgcagctgttaatggaatatacgcacgtccgattgtacctgctttcatatttttagcaaaatctgcattaccttttctttgcacgtcttgaggtacaaaatgaacaatgttacccgcgtcataccaagacggctgtcctgcttgttttgattgtgatactaactttctagctataaatttagcgtctgttaaataatcaccacgtgcagacgtatgatttaaccaacctaaacccgcactatacccctcatttttttcatatacagcaaaaagagtaggtgatacacctatctcttttactgcttttaatacttgtctgattttactttcattaccaccaagccatacattaaagcgcccatatccttttactttagggactaactggtctatcgttaaaccgaaatcatcattaatataggaatgtgtaaatttatctatcttctcttggtcgttcattgttatcactcttttcagtatcgtttttaattacttttaatttatctttaatttgttcaggcactaatacgttcatttctgcgcaattttctacaatagataaaccctcattagcgatataataaaaaatcgtaatcatgagtagcccaccttttaattgtaaaatctggtcaatgatgtttgctaaaatgataatacagaatatcaataattttttaacaaaacctttcattgatttttttgaccataagttattatttttaatagctttagcaaaacctgtgataacatcaataatcattaaaacaaataaaaaataaagtaattttaaatctcctgcataaataaacatgtgaaatgcttcagtatcggtaaatcttagtttaacctcattcattttatacaccctctctaaatttgttatttaacggattctgtaacattggattacctgaaccgtcattatgccaaaatctcactcccgattctaaaattgcttttaattgctccattaacatcgggtcaatgtcacgtatagtatacgtacctgtacattttaaataattgcatatagtcatactattaattggttcaataaatgtgttatagtcattcacttcaaaaccaaacaacatataatatttttgtaaaaatgaaatttctttaggtgacggtacactaatcttcatcgttaatccattaatactatttgctatttggaatgcgttgcccatttctgattcagtcacagacggtggttgtaaggctaaatctttatattctgcctgttgttgtttgtagaaattatattcttcattaaacttaccaaataaagcagtcggacttaaattacttgctacacttacagcgtcataaaatcgtgatttcaggtcactgccatttaatacattatcaatacgatttgtaattaattgactttctgcattacgctgtctattggcttgttgtgattgtcctaaaattccgttattaattaatataggtacttgcgcaaaactattaaatgttatatttgtatttaagaatgaacctgtatcaattaatatatctttatttttagcaagtatcggtctatcgttttcagcactgttataatctactggatatactcgaacttcattatgataaccaatgattgactttgtacgtaacttaatacctgttttttgcgaaatcttaccagcgtcgagtaacattgtattaccgttccagtcataaaattcaatcgtcatatactcattacgtatcatatgtttaaactcgtcttttttagacaacatcatttcttgaagctttgtgaaacttaatgataaatcgtttaaactccattcttttgattttccaccttgttttaacgtctttaatccagtaattttttcacttgtcttaacgtcctctaaatcttttgtattaataaagtctttaggtaacatttgaaccttttgaaagttttgtgtaatccacggataagcactcattttatccataaagttaataaaatccccgtattccatgacgtataagttaactggtgatgtgatattgtcatatatcgtacctttagacgtatctaagtttggctcttttttcgtaccaaatttctttgataaatcagcgcttgactggaataacactaaattttccaaatactgttgcatttgattatacacatagtttttattcgatacttttaacacatcatcattgttacgtaacattggtaacatatagttatacgtgcgttttgataagtgttgacgttcaatattaacgtttgagagttgctctaatacattcccttgtgtatacgtcataatagtatcaattacaaaatatatttttaccacaacatcattcacatattcgatttgattcacaaatgcataataacgtctgtcctcaaaatctgataaaaacgtcatatagttaatcccttgtgcgtcatgccactgcatatcaacattgatttccattctatcacgtataaaattatacggttgtttggaatagtctaatgatttaaaatgacgtccatttaaaaaataatcatcacgatctttattactattaaaatgaatcgtattttgataatcagtaaacggtgtgttatagaaaaacttaaaatttgttaattttctcatttttacctccataaaaatagtcgtataaataatttatacgactattataacatttttattcaatgatttgtgtatctattgcaaaacgtatatcaccatttgaaagctcactatcgctataatttgatgtaacaaaatgtaattcacctttaaaatttaagtacattcttgtatttatcattttattatcaatcgcacattgtgtgtagtgatgtgttgatattaattttccgttaatcgtacctaatttaatatcactgtttttcttaatcccttttaataccccttttaattgtatggttttaacaccattaattgtgacaatacgatattgcggtgctggataaccaccattgctatcacttgcaactataccactttcgagtgatatatcttgccaacctgtatcgttaaattgtaattttgcactgttaattttttgattaaaattttgttcaatttctgatttagattgtgcaattttagtatctatatttaagttatccacttttgttgataaaccgcttatacttgattcgtttgttgatgtttttgttttaaatcactaatatcattatcatatgttgatgttttttgttttaactcattaatatcattatcgtatttagataaatcaacgttaccgttactgtcaacaataggtctatcttttaatgcttgaatatctttttcaatttttgatattttatcattatttgattttaaagtagcaatgttagatttaatataattaatatcctgtgtataatcttttggatttatactgttaatttttgattctaattcttttatcttatcaaggttggcatttgctttgatgtcattaatggtttgttctaaactttcaagtttcccagcacttgaattttgttttaacttattaatatcctcttgtatttcttgaattgttttgtcattgttttgtttagattttaataattcaatttgactttctatctcttttattttatcaagattaacactttttttaacttctgctaattctctttttaaagcgtcaatgttttcagcaccagtatttgctttaattaaattaatttcatttgtgtttcgtcctacactatctttagtagcgtttaacgattgtgtaagtgtttcatatttatcatcatactgtaacattgatttttcaaattcatttaattgtgtttgatgttgttctaaactttcatttaatatgacatctttttcttttaatgaatcaatctcttttttattactatcaatcattggttggaatttttttattttctctagaaatgttgatattttttctttgttatcattaattgcaatatcatgattttctatttgactactgtatttattaatcaatgtttttaaatcattataaaatgttaacttataataaccagtatcagtacggacataaatatgcccgtctgatgtactgattaagtcattttcttctgttaaaaaatctgctaacctgtctattgtttcaacttgtcttaaacttcttacgattctatcagccattgttcacacctcttatttgtatcgtttccaactaaattcaaagaaaaagcctaaaatacccattatgagaacaccccccaaggaataccaacactgtaactattacccgttttaccgttccattgtctcactggtaaataataacgtgtaccttcccaattgtaaccaatccaaactaacccatctgataaacaaacctcgtcatatggtgtataaccatttggttgaaaccaatagccgttaggttcagataatttaggactaacgacacgtgcaaatattggtaaaaaaccacatgtaaatgttgcattttcatttctgtaatatgtgccgtattggttttgtttccattttccgaatgtgtttacttttgatgtttctaattcgttactgtcactagcagaaaatttaggtcgaataaagtgtgttacaccgtcataataatgtgttctaattgtcgctttttcccaaccgtcaaagccaccacctaaccagttttgttctagacatgtataataatctaaattaccacttaacacacattgaatatgtccatattgcgcatattgtccatttgtatatacagcaacatcccctaattgtggtttaaagctcggcgtattttcgtacaccgtcgctaaacctttaaagtcattattaatcgcgtctttggcattgccccacatacgaactttaccgtctgtaatgtaatatatataagcaactgctaagtcagcacattgataaccaaatgctaaatcaaagtcaatgccgacaccctcatgattatataaccattcttttgcttgttgttgtgatttcatggcacattatcctttcttaacccaatcatattcacgatgtttcgtttccgcattaacattactaaagaattctttatgatctttaacgttagcctccaacgtttgtcttacttctccaacagcgttaccacttgaaacacgtaaccatgcacccacttttttaatttcttctggtgcgtctctaaacaattccatttgattacctgtaatgtaatattcaccaggtgtagtaacgtaagcaatccagttattgtactgacttgcctccaaatattcttgatatggtgcgtctgttttgattgttgtccataaaccataatcccattttaatgtaaatacgtcgagtgtcataccacgcaccattttaaccattttacgacctgttgagaaacgtgttaattcttgcacagtacctaatgtttgtgttgtagggtatacattgatgaaacaaccagcgtcaatgatacgcttactaccattcattggcatatttttaagtttttctgcagtaccaccgtcaatataataaaaacctgcttgcgttaaattgtttaaatcgtcgatatggtctggaatagataacgcacgaccgtcgtcttttgttaatttatagttttgtgaacctcttgcgcgtaatgcttcaaagtgttcatattctccaagttggaagaaaccgtataaattattgaaacgttttccacctccaccatttgtcatagcaagtaataacgatttacgttttgtttttggattagtataaatacaaataccctcaggctctttaaagttatcacgtgggaaattaattccgtcttgatatgataatttaaacggataatcataaatcttttgacctgttgttaatgaatatttaccaatttgaacgtgtgaattaactgaactgttaccacttaaccagtataaatcatcaccgtcaacagcaatcccttgcatccaacgattatcattgttttctgaattatcaatcgtcatttctttttctacattatcaatgtgattttttacgtcagctcttgaacgcacctgtattgtcccgtcaccgaatcttaaaatgagtttgtcattttcttcatcaattaacggtgtaaacgtgtgtttgtttaaaagtgactgtggtgtataatctgttaaccctttagcctcttctaaatctaaaatataattatctttatatgcgacttgtaacagttttgctacaccgtcatgatgtaaccatattttcatttcaccgttagattgtctttctaaacctattgtagtaccgtgaccaccttgtacaatacgcatactagaaattaagtcaccgctaggcgttaatttattaatccaaaaaccttctggtttttgtgaatctgattgtgtagagtacatttgattcgtttctttatcgatattaatggattggtttactgcgttacgaataccaccgaagcccataacaaactttggttcaagctcatttaattcaaacccattaacgaaacggtcaatgtctttaattagatctttcacttctgctttaaaatcattcatttgtttcatttctgcgactttaaataatgcaaatgcagatgttaaaccagcactatatttagtaaactcatcgtgaatgattttatcaatcgtaccatcgtttaaccaacctctaaataagtcttttgcttggtctggaaatgctttcattaagtcgtcccagtttctaaaacgtttttttaactcaccgtcatagtcccaaatgcgacgtgctaatacttcaatgagttttgataatcttgaaatataatcataatacgattttgaatttgtattataatctgctctatcatcgtaaaacggtgtgtaacgttctcttgttttatatatttcgtctaaaaatggacgaatgtcgtcaaaatatttaaaatcgttttcattatatgccataattttccacctttaccaaatttgtaaaaaacattttttatcaaattcatttaaaattttctttcttaaatcgtatactttatcaatattatcaattaaatactgttttgaaaattgtgtacctttcgcattacctttttgattttgattacgttttgcgttttgattactttcgttacttgatttattaacagttttaccgttatcaatcgtgttattgtctgcaaattgtaacgttgttttatctacatcaatgttaacctcgctttgtggtaatgacacataagcatttctgttagctgtcataccagttgaattgtctaaagatgtagcattttgatttgaggtttcatctgtgttgtttgttgtatcttcattatgttctgtaaaaccttgtgattgtagatatttttcaacttcgcttgatgaataaaccacattcaaataatcctcatgtgtgatacatacagtaatcacttgcatgccaaaagcttcaactgtttgtctattgatttctctatctaaaaagtgtattgtaaatgattttttgaaaagtaagtcagataagtcatctttaagtttaaaacctttaaatactttttcgttaacgattgctaaaacgtctttgtcaaacttcaacattttttgcataaattgaaattcatcatcataaaacgttaatttatcattatttacaaattcgttaaaaccttttttaattaattctgatttaataaaatcgtataaagtcattgtatatctagccactataatcactactttcatcattagacaatgaatctatcatcgtaatttctgaagttacttcatcgtcgtaatacggtttaatatctaaaccataacgttttgataagaatgtaatcggttcacgaccttttaaataaatattactattagatgtagtaaatccacgattactttttgcttcttcatcggaaacgccgctttccttatcaactgctaatgaattaatacctaaatagttacttaattcactaattttattttgatattctcgtttcatctcagttagtgctggaatcacactattactggttaaatctatgatatcatcatcggcgttaaacattggtgacattttaacaaatggtgcaccgttatatatttccgatacaagttgattaactgactcatcattaatgtctgatttaaatattttgctaaattttgcttgcataattaatgaaaatcgagataaaacaacctcagataattcatcagtataatgttctataatttctatatcactattatattgaattggtttattttgcatgacaacaaagttaccactcatacagttatcatatattttatgaatctgtaagcattcatctggtattaaatagtctggaacaatgaaataaatatcttcttttgttaatcgtttttgaaattgaaaattgaaatttgatgaaaagtttggggcttgattaaaataagtgttgttaacatagcccaaaatcatgatttgttcatttcttgctttaccaacaacaacattaatgttttgccttaatgcagattctaattgaataaaatctataccaaccgaatctcgattggtatagtttatgagtagtggtaaaaattccaaataacgattaaacataagacgtttaaatctgttgcgatgttcaacaactcttttgttgatttcttttgataattcaacctgtacgcctttattatgtttagtcatttatagcacctctattattctgttcttggtgttacatcttggtctgtaattaaaattttattaaagaatgggctaatggctttaaatgaatagtaatgaatccagtgtgtgacttcatcaaattcaccattatagaatggttgttttaacatgccttttgtgtaacgtttatatttaattgaattaatatccaaaataaacgcgtataaatctgattttggtttaatttcttcaactttatctttaaactctggtagttttgacacatcataagtgaatactgaaccaactggaattgtatcacctttactagtttgataatcaccataagcgcgcaagaaagctactgaattatcacttgaaacgacaatgtcatcagtaactttaaacacaccgcctaaatcatcaaaactaatgacgtggtctgtgaaatcaattccagcaatttggaatgtgttcgcaatctttgtatctaaaagataagattttaatgaatctgttgttaaaatcacaatatcttttaattttgagactgttgtatattgtccaatagcaccacctgaagcacgatgaacttcattatatttagcactgttgttttgtaagttgagaatagcttcaaaaactttacttgctaaatcttcttttgatgttgctttacgaacatttgatttagataactgattcaatgagtaatcaactaacattgctcgcatttctttttcttctaatacgttaatatcagaaattttctttttatagacacctaatgcataattagttgcgtctgctaatgtttggaaattgaaacgtgtatcattgttatttaatgtgaatttttgtttcttcacaataccgctaccatataacttagtagccatacgtggataattacgttttaacattaattcctcatttttagataaatccatgttaataggtactgtgtccataatgacatattcttcactgtattgacctataaagtcctgttctttagctaaccaattgaaacggttacctaatgcaatatcgattaataacgtttcgttaatcttagggaataaaaatttatttacaaatgtttcaaacattgtattagaattatcccacttatcgccaaacgtccatgattttgaataagtatgattaaagtcttgtaatgcagatttagctgactttgcaactaaaagggcagtttcattttttgtactctcttgtgccataatttattattcctcctctacgtcaccgctaaatgactgttttgaaagtgaatggatttgtacgccataactatcttcacttttgtttgtatcaattgacatattttcatttaattctgttcgtttatttaatcttgaatcttcatatgatgtacccatcatagaacgcatattgttaccctcaaacatgtttaaattcctcctaatctaaatctaacttatcgactaattcttcatctgaatagtctttgtcgttgtcatctgcttcagtaacatctggttgtggttgtggttgtggttgttgcatttgtgatgtttcaaaattagtaaatcgttgttctaatgaagcgatacgttgttctaatacaacagggtcaaatttcgaactatcttcatctgttgtagtaggttctaatttgttttcgttttcttcttcgattgtttctactgttttatcttcagtagattcttcagttgattctttagttgattcttcagttgattcttcagttgattcttcagttgattctgaagtttcttctttgtcgtctggttttacgatttcatcaaattctgtcatttagacacctccaaaaatattttataacttattatatcatagaatatttaaataagtaaattaaatttattttaagttcaaatcataaattttgataaaagtcaatagatgtatatattttgtatttgatgaatatt

SEQ ID NO: 3 - DNA, 17930 bp, Unknown
  bacteriophage strain capable of infecting bacteria of the genus Staphylococcus
aaactaaacttataaaaactgttcaccaacttttccaacttatctaacctattacatattcatcaaatacaaaatttatgtatctattgacttttattcaaaattatgattgaacttaaaatctaatttcttctattaaatagtagttttaaattatttaaatttttttaccttattctattgacaaaacttttaaacgtttgttatactgttaatgtaatcaaaacaaggaggtaacaaaatggaaaatgtaaaacctttacaatcatttttttacaaaatggtgatatagctattcttatgggtgatgaatcaacttatgaagtatcattatttgtaattgaaaaatcttcatttgaacagttagaacataattcacctaaaaaaaattattgatgatatatggagtgataacaatggttaatgttgataatgcaccagaagaaaaaggtcaagcttatactgaaatgttgcaattattcaataaactgattcaatggaatccagcttatactttcgacaatgcaattaacttagtatcagcttgccaacaactattattaaactataacagttctgttgttcaattcttaaatgatgaactaaacaacgaaactaaaccagaatctattttagcttacattgctggtgatgacccaatagaacaatggaatatgcacaaaggattttatgaaacgtataacgtttacgttttttagaaaggagtgatataataatgaaacctgatgatattgttacattacgaattaaaggttatattcttcattatttagatgataataatgaatacatagaggaatttataccttatcacgattatcatttatcaaaacaacaagcaaaagatttaatcccacaatcatatacacttttatctactacacgacatacaaaaactatgcaagtttattacaatgatttactacaaattgcaattgcagaaagcaaataatttaaataagaggagaaataaaaatgacaaacgtaaaagatattttatcaagacaccaaaacacattagcgagattcgaatttgaggaaaaagaaagagaatttatcaaactatcagaattagtagaaaaatacggtatgaaaaaagagtatatcgttagagcattattcacaaacaaagaatcaaaattcggtgagcaaggtgttatcgtcactgacgactataacgtaaacttaccgaatcacttaactgaattaattaaagacatgcgtcaagacgaggacgttgttaacattatcaatgctggtgaagtgcaattcacgatttatgagtatgaaaataaaaaaggtcaaaaaggttattcaatcaactttggacaagtatcattttaataaaatttcataggggatatttatcccctatttttatgaggtgctaaaatggaacgtaaatacaaaacggtattattatattgtgatgagattaaaggtcatttaccacatcaaatagcaatgtttgaagaattatatgacgctaaagttttatactcatattatgaatataatccatttactgaaaaatatgcgtatatgatagaatacattaaggagatataaaatgaaaattacaacaacattaaatacaaaaaacaataatgatttatttactttagatattgacattgatattcatacacattgttttgattttcttattgttttttatagaagatattcaaatccaaattataaaagagaagcatttacagattgcaccattgatgacgtattagaatattttgagaatccattattagctgatattacaataatttataaaaataaggtaatttatgatttaggaaaagtgattgaccatgaataacctattagatattattattgttttccttttagcatttttaattacacttgtaatacttatgacaatgcatatacgtgtgtcatttggtgttttatttactacattgattatattctacattatctttttagtggttatatatggtttatatggaggtcgttagcaatggtgagacatacgtccgaaatggataaatggaaaaaagaaagagacgcaagaaaagagcaggaaaaagaattgtttttaaatgattttagtactgttaattttaaatttgatgataaagatttacaagaggcttacatagacgcatggaaacatttcgcacatttgccctattttccaaaagaaagaaacgtgtcatatgcaaatgctgtatcattggtaagaggtaaaagacatgaacaattaaactatatacttgaaatatataaccgtaaagatgaatctaataataaaaacgctaaaaaacataaatatgctttatatgaattacaagcaaaaaataataattcttctatgtataaatatataaaggaaattgacactttatacaaagaaattggtaaatcagatagaccagtgactactattgatgatgaagatgtgaggtataactttttatattatgcaacatttgaagactaattttaatactgtaaaagacatcataaactattacaaggagcaaaaacatggtgaaacaaaatcgtttaaacatggtaagagattatcaaaatgctgtcaatcatgtcagaaaaaaaataccagataactataatcaaatagaattagttgatgaactcatgaatgatgatatagactattatatatctatttcaaaccgttctgacggaaaatcgttcaactatgtttcattctttatttatttagctataaaacttgatattaaatttactttattatcacgtcattatacattacgtgacgcttatcgtgattttattgaggaaatcatagacaaaaacccactattcaaatctaagcgtgtcacattcagaagcgctagggactatttagcgattatctatcaagataaggaaatcggtgtgattacagatttgaatagtgcaactgatttaaaatatcattctaactttttaaaacactaccctatcattatatatgatgaatttttagcacttgaagatgactatttaattgacgagtgggataagttaaaaacaatttatgaatcaatcgaccgtaaccatggtaatgttgattatatcggcttccctaaaatgtttttattaggtaatgcggtcaacttttcaagtcctatattatccaatttaaatatatataacttattacaaaaacataaaatgaacacatcacgactttacaaaaacatttttttagaaatgcgaagaaacgattacgtaaatgaaaagcgtaacacacgggcattcaattcaaacgatgacgctatgactactggagagtttgaatttaacgaatataatttggcagatgataatttaagaaatcatatcaatcaaaacggtgattttttctatattaaaactgatgaaaaatatataaaaattatgtataatgttgatacttttaatgctaatattattgttataccttatacaaaacaatatgaattttgtactaaaatcaaagatatagatgacaatgttatttatttaagagaagatatgttttataaagaaaacatggagcgttattattacaatccaagcaatttacattttgataacgcttactcaaaaaattacgtggtagataatgatagatatttatatttagatatgaataaaattataaaatttcatataaaaaatgaaatgaagaaaaatatgagtgaatttgaaagaaaagaaaaaatatatgaagataactatatagagaatacaaaaaaatatcttatgagacaatatgaattataaaggtgtgtacgattatggggttactagaatgcatgcaatatcataaacatgaacgtcgaatgattttatactgggatatagaaacattagcgtataataaagttaacggacgaaaaaaaccaaccaaatataaaaacgtaacgtattcagtagcaattggttggtttaatggttatgagattgatgtagaagtatttcctagttttgaatcgttttatgacgcgttttatacgtatgtgaaacgacgtgatacaatcactaagtcaaaaacagatattatcatgattgcacataactgtaataagtatgacaaccattttttacttaaagataccatgcgttattttgataatatcacacgtgaaaatatatatttaaaatctgcagaagaaaacgaacacacactaaaaattcaagaggctactattttagctaaaaatcaaaatgtgattttagaaaaacgtgtgaaatcgtctattaatttagacttaacaatgtttttaaatggatttaaatttaatattattgataactttatgaaaaccaatacatcaattgcaacattaggtaagaaattactcgacggtggttatttaacagaatcacaacttaaaacagatttcaattatacaatttttgataaagataacgatatgtcagatagtgaagcatatgactatgctgtgaaatgttttgcaaaactcacacctgaacaacttacatacattcataatgacgtgattatattaggtatgtgtcatattcattatagtgacatttttccaaattttgactataacaaattaacattctcactaaatattatggaatcgtacttgaataatcaaatgacgtgttttcagttactcaatcaatatcaagatattaaaatatcatatacacattaccatttccatgatatgaatttttatgactatatcaaatcattttatcgtggtggtttaaatatgtataacactaaatacataaacaaacttattgatgagccttgtttttctattgatatcaattccagttatccttatgtgatgtatcatgagaaaattccgacatggttatacttttatgaacattattcagaacctacattaatccctacttttttagatgatgacaattatttttcattatataagattgataaagatgtatttaacaatgatttattaattaaaatcaaatcacgtgtattacgtcaaatgattgtaaaatactataataatgataatgattacgttaatattaatacaaatacattaagaatgattcaagacattacgggtattgattgcacgcatatacgtgttaattcgtttgtgatatatgaatgtgaatactttcatgcacgtgatattatatttcaaaactattatattaaaacacaaggtaagttaaaaaacaaaataaacatgacatcaccttacgactatcatattactgatgacatcaacgaacacccatactcaaatgaggaggttatgttgtctaaagttgtactcaatggtttatatggcatacctgcgttacgttcacattttaacttattccgtttagatgataacaacgaactatataatatcattaacggttacaaaaacactgaacgtaatattttattttctacatttgtcacatcacgttcattgtataacttattagttccattccaatacttaacggaaagtgaaattgacgacaattttatttattgtgatactgatagtttgtatatgaaatccgttgtaaagcccttattgaaccccagtttattcgaccctatatcattaggcaaatgggatattgaaaacgaacagatagataagatgtttgtactcaaccataaaaaatatgcatatgaagtgaatggaaagattaaaatagcttccgctggtataccgaaaaacgcctttgatacaaacgtcgattttgaaacctttgtacgtgaacaattctttgacggtgctataatagaaaacaataaaagtatctataacgaacagggtacgatatcgatttatccgtctaaaacagaaattgtatgtggtaatgtatatgatgaatattttactgatgaacttaatatgaaacgtgaatttatcttaaaagacgctagagaaaattttgaccatagtcaatttgatgatattctttatattgaaagtgacatcggttcattctcacttaatgacttatttccagttgtacgttcagtaaataataaatcaaatttaaatatattaaaaatgcaacacgatgacatcaaaaaaggcaactgttaaaataacagtcgcctttttattttgagataacatgaaaaatgtgtacgaaaattgattatgttttgtattttatttactagcattactagcatgttttcattatagcatagttaattaagcaataccactgaagaatacaatattatcaccagcgttatgaggtacaccattaatcaatgtatataatacaacccgtgacggtgccacgtatggtggtacgttatagtttgctactaagaatgaaccatcgtcaaatactgctacaacgacacctgtgtgaccaatgccatatgctgttgcttgtaagtagggtggtttacttgaaaagccataaccgacagtaggattgtgcgttgttttagcacctaactttttataaacataccacacacgttgaccgtttgttatttgtccgtcgtcggtaggttgtcttttgccatgtagttgtgacatatacgcccatgttaattctgtacactgccctgcattacctgtttgaggaaatatgttaccgggtttgtataagtattcttttttgaataaaggtacaccaattgcttttttatatttttctggtaactgtgcatacgtccagttaccaccaatgacgcgaccacttttaccattaggtttgactgatttaccactaattggtttatggtctccgtcatcatcagtaggatttgaactactacccccactatctacttgcacgctatcaatcagtttttttaatgaatcgagtagcccaatcgtcattttaatatgatatgtgttgttaaatgttttttgtaatgtaaaataatcattactaaaaaatttgtcgctacctatactgtgtacatcccattgtaatgcatcttgtactttttttaataattcttgcatggcttgttttgctaaagcgagcagtgaactaccactgtcgccactactaccactgtcagacgaatcactaggtgaaccacctttaccgtctaattttccaccccatgctagaatagcatttgcaccgtctaaaaatggattaccatagttttgtactttattatatgatgctttcaaacccggtggataatatgccgcccaagtagctgcagctgttaatggaatatacgcacgtccaattgtacctgatttcatatttttagcaaaatctgcattaccttttctttgtacgtcttgtggtacaaaatgtactggattaccgtaatcataccaagacggttgcccagcttgttttgattgtgatactaattttcttgctatgaatttagcgtctgttaaataatcaccacgtgcagacgtatgatttaaccaacctaaaccagcactataaccctcatttttttcatatacggcaaaaagagtaggtgatacacctatctcttttactgcttttaatacttgtctgattttactttcattaccaccaagccatacattaaagcgcccatatccttttactttaggtactaactggtctatcgttaaaccaaaatcatcattaatataggaatgtgtaaatttatctatcttctcttggtcgttcattgttatcactcttttcagtatcgtttttaattacttttaatttatctttaatttgttcaggcactaatacgtccatttctgcacaattttctacaatagataaaccctcattagcgatataatagaaaatcgtaatcatgagtagcccaccttttaattgtaaaatttggtcaatgatgttagctaaaatgataatacagaatatcaataattttttagcaaaacctttcattgattttttagaccataagttattatttttaatagctttagcaaaacctgtaataatatcaacaaacattaatacaaataaaaaataaagtaattttaaatccccagcatatataaacatgtgaaacgcatctgagtctgtaaatctgaattttacttcgttcatattatacaccctctctaaatttgttatttaacggattctgtaacattggattacctgaaccgtcattatgccaaaatctcacacccgattctaaaattgcttttaattgttccattaacatagggtcaatgtcacgtatagtataagtacctgtacattttaaataattgcaaacagtcatactgttaattggttcaataaatgaattatagtcattcacttcaaaaccaaacaacatataatatttttgtaaaaatgtaatttctttaggtgacggtacactaattttcatcgttaaaccgttaatactgtttgcaatttggaatgcgttgcccatttccgactcagtcacagacggtggttgtaatgctaaatctttatattctgcttgttgttgtttgtagaaattatattcttcattaaacttaccaaataaagcagtcggacttaaattacttgctacacttactgcgtcataaaaacgtgattttgggtcgctaccatttaatacattatctatacgacttgtgattaattgactttcagcattacgctgtctattggcttgttgtgattgtcctaaaattccgttattaattaatataggcacttgcgcaaaactattaaatgttatatttgtatttaagaatgaacctgtatcaattaatatatctttattttttgcgagaatcggtctatcgttttcagcactgttataatctactggatatactcgaacttcattatgataaccaatgattgactttgtacgtaacttaacacctgttttttgtgaaatcttaccagcgtcgagtaacatcgtattcccgttccaatcataaaattcaatcgtcatatattcattacgtatcatatgtttaaactcgtcttttttagacaacatcatctcttgaagctttgtgaaacttaatgataaatcgtttaaactccattcttttgattttccaccttgttttaacgtctttaatccagtaattttttcacttgtcttaacgtcctctaaatcttttgtattaataaagtctttaggtaacatttgaactttttgaaagttttgtgtaatccatggatatgcactcattttatccataaagttaataaagtctccatattccataacgtataagttgactggtgatgtgatattgtcatatatcgtacccttagacgtatctaagtttggctcttttttcgtaccaaatttctttgataaatcagcgcttgactggaataacactaaattttccaaatactgttgcatttggttatacacatagtttttattcgatacttttaacacatcatcattgttacgtaacattggtaacatatagttatacgtgcgttttgataagtgttgacgttcaatattaacgtttgagagttgctctaatacattcccttgtgtatacgtcataatagtatcaataacaaaatatattttaacaacaacgtcatttacgtattcgatttggttaacaaatgcgtaataacgtctgtcctcaaaatctgataaaaatgtcatatagttaatcccttgtgcgtcatgccactgcatatcaacattgatttccattctatcacgtataaaattatatggttgttttgaatagtctaatgatttaaaatgacgaccgtttaaaaaataatcatcacgctctttattactattaaaatgaatcgtattttgatagtctgtaaacggcgtgttatagaaaaatttaaaatttgttaattttctcatttttacctccataaaatagtcgtataaataatttatacgactattataacatttttattcaatgatttgtgtatctattgcaaaacgtttatcaccatttgaaagctcactatcgctataatttgatgtaacaaaatgtaattcattgttaaagtttaaatataatcttgtattaatcattttattatcaatcgcacattgtgtgtagtgatgtattgattttaagtttgcgttaatcgtacctaatttaatatcaccgtttttcttaatcccttttaataccccttttaattgtatggttttaacaccattaattgttacaatacgatattgtggtgctggataaccaccattgctatcacttgcaactataccactttcgagcgatattgtggtgctggataaccaccattgctatcacttgcaactataccactttcgagcgatatatcttgccaacctgtatcgttaaattgtaattttgcactgttaattttttgatcaaaattttgttcaatttctgatttagattgagcaattttattatctatatttaagttattcacttttgttgataaactgttaatacttgattcgtttgttgatgttttttgttttaaatcactaatatcattatcatatttagataaatcaacgttaccgttactgtcaacaactggtctatcttttaattcttgaatatctttttcaatttttgatattttatcattatttgtttttaaagtagcgatgtcagatttaattgaattaatatcctgtgtataatctttttggttaatactgtttaattttgtttctaactcttttatcttatcaaggttggcatttgctttgatgtcattaatggtttgttctaaactttcaagtttcccagcacttgaattttgttttaacttattaatatcctcttgtatttcttgaattgttttgtcattgttttgtttagattttaataattcaatttgactttctatctcttttattttatcaaggttgacactttttttaacttcagctaattctatttttaaagcgtcaatgttttcagcaccagtatttgctttaattaaattaatgtcatttgtgttacgtcctacactatctttagtagcgtttaatgattgtgtaagtgtctgatatttatcatcatattgtaacattaatttttcgaattcatttaattgtgtttgatgttgttctaaactttcatttaatatgacatctttttcttttaatgaatcaatctcttttttattactatcaatcattggttggaatttttttatcttctctaaaaatgttgatattttttctttgttatcattaattgcaatatcatgatgttctatttgaccactatatttatcaatcaatgtttttaaatcattataaaatgtcaatttataataacttgaatcagtacggacataaatatgccgtctgatgtactgattaagtcattttcttctgttaaaaaatctgctaaacgttcaattgtttcaacttgtcttaaacttcttacgattctatcagccattgtctacacctcttatttgtatcgtttccaactaaattcaaagaaaaaacctaaaatacccattatgagaacaccccccaaggaataccaacactgtaactattacctgttttaccattccattgacgaaccggtaaataataacgtgtcccttgccaattgtaaccaatccatacatacccgtctgataaacaaacttcgtcatatgttgtatagccgtttggttgaaaccaataaccgttaggttcacttaattttggactaccgacacgtgcaaatattggtaaaaatccacatgtaaatgtcgcattttcatttctgtaatatgtgccgtattggttttgtttccaatttccaaatgtgtttacttttgatgtttctaatgcgttgctattactagcagaaaatttaggtcgaataaagtgtgttacaccgtcataataatgtgttctaattgttgctttttcccaaccgtcaaagccaccacctaaccagttttgttctagacatgtataataatctaaattaccacttaacacacattgaatatgtccatattgtccatttgtatatactgcgacgtcacctaattttggtttaaagttcggtgtattttcatacaccgtcgctaaacctttaaagtcattattaatcgcgtctttggcattgccccacatacgaactttaccgtctgtaatgtaatatatataagcaactgctaagtcagcacattgataaccaaatgctaaatcaaagtcaatgccgacaccctcatgattatataaccattcttttgcttgttgttgtgatttcatttatatcactcctatttttgatgttttgctacccaaccatattcacgatgtttcgtttcagcattaacattactaaagaattctttatggtctttaacattagcctctaatgtttgccttacttcaccaacggcgttaccacttgaaacacgtaaccatgcacccacttttttaatttcttctggtgcgtctctaaacaattccatttggttaccagtgatataatattcaccgggcgtagtaacgtaagcaatccagttattgtactgacttgcctccaaatattcttgatatggtgcgtctgttttgattgttgtccataaaccataatcccattttaatgtaaatacgtcgagtgtcataccacgcaccattttaaccattttacgacctgttgagaaacgtgttaattcttgcacagtacctaatgtttgtgttgtagggtatacattaatgaaacaaccagcgtcaatgatacgcttactaccattcattggcatatttttaagtttttctgcagtaccaccgtcaatataataaaaacctgcttgcgttaaattgtttaaatcgtcgatatggtctggaatagataacgcacgaccgtcgtcttttgttaatttatagttttgtgaacctcttgcgcgtaatgcttcaaagtgttcatattctccaagttggaagaaaccgtataaattattgaaacgttttccacctccaccatttgtcatagcaagtaataacgatttacgttttgtttttggattagtataaatacaaataccctcaggctctttaaagttatcacgtgggaaattaattccgtcttgatatgataatttaaacggataatcataaatcttttgacgtgttgttaatgaatatttaccaatttgaacgtgtgaattaactgaactgttaccacttaaccagtataaatcatcaccgtcaacagcaatcccttgcatccaacgattatcattgttttctgaattatcaatcgtcatttctttttctacattatcaatgtgattttttacgtcagctcttgaacgcacctgtattgtcccgtcaccgaatcttaaaatgagtttgtcatttgcttcatcaattaacggtgtaaacgtgtgtttgtttaaaagtgactgtggtgtataatctgttaaccctttagcctcttctaaatctaaaatataattatctttatatgcgacttgtaacagttttgctacaccgtcatgatgtaaccatattttcatttcaccgttagattgtctttctaaacctattgtagtaccgtgaccaccttgtacaatacgcatactagaaattaagtcaccgctaggcgttaatttattaatccaaaaaccttctggtttttgtgaatctgattgtgtagagtacatttgattcgtttctttatcgatattaatggattggtttactgcgttacgaataccaccgaagcccataacaaactttggttcaagctcatttaattcaaacccattaacgaaacggtcaatgtctttaattaggtctttcacttctgctttaaaatcattcatttgtttcatttctgcgactttaaataatgcaaatgcagatgttaaaccagcactatatttagtaaactcatcgtgaatgattttatcaatcgtaccgtcgtttaaccaacctctaaataagtcttttgcttggtctggaaatgctttcattaagtcgtcccaatttttgaaacgtttttttaattcaccgtcatattcccaaatacgacgtgctaatacttcaatgagctttgataatcttgaaatataatcataatatgattttgaattggtattataatctgctctatcatcgtaaaacggtgtataacgttctctcgttttatatatttcgtctaagaatggacgaatgtcatcaaaatatttaaaatcgttttcattatatgccattatttaaccacctttaccaaatttgtaaaaaacattttttatcaaattcatttaaaattttctttcttaaatcgtatactttatcaatattatcaattaaatactgttttgaaaattgtgtacctttcgcattacctttttgattttgatttcgtttagcgttttgattactttcgttacttgatttattcacagttttaccgttatcaatcgtgttattgtctgcaaattgtaacgttgttttatcaacatcaatgttaacctcgctttgtggtaatgacgcataagcatttctgtttgctgtcataccagttgaattgtctaaagatgtagcattttgatttgaggtttcgtcggtgttgcttgttgtatcttcgttgtgttctgtgaagccttgtgattgaagatatttttctacttcacttgatgaataaaccacattcaaataatcctcatgtgtgatacatacagtaatcacttgcataccaaacgcttcaactgtttgtctgttgatttctctatctaaaaagtgtattgtaaatgattttttgaaaagtaagtcagataagtcatctttaagtttaaaacctttaaacactttttcattaacgattgataaaacgtctttgtcaaacttcaacattttttgcatgaattgaaattcatcatcataaaacgttaatttatcattatttacaaattcgttaaaaccttttttaattaattctgatttaataaaatcaaataaagtcattgtatatctagccattgtattcactactttcatcattagacaatgaatctatcattgtaatttctgaagttacttcatcatcgtaatacggtttaatatctaaaccataacgttttgataagaatgtaatcggttcacgaccttttaaataaatattactattagatgtagtaaaacctcggttacttttagcttcttcgtccgaaacaccgctttctttatctactgcaagcgaatttatacctaaatagttacttaattcactaattttattttgatattctcgtttcatctcagttagtgctggaatcacactattactggttaaatctatgatatcatcatcagcattaaacataggtgacattttaacaaatggtgcgccgttgtatatttcagatacaagttgattaactgattcatcattaatgtctgatttaaatattttgctaaattttgcttgcataattaatgaaaatcgagataaaacaacctcagataattcatcagtataatgttctataatttctatatcactattatattgaattggcttattttgcatgacaacaaagttgccactcatacagttatcatatattttatgaatctgtaagcattcatctggtattaaatagtctggaacaatgaaataaatatcttcttttgttaatcgtttttgaaattgaaaattgaaatttgatgaaaagtttggggcttgattaaaataagtgttgttaacatagcccaaaatcatgatttgttcatttcttgctttaccaacaacaacattaatgttttgccttaatgcagattctaattgaataaaatctataccaaccgaatctcgattggtatagttaattaatagtggtaaaaattccaaataacgattaaacataagacgtttaaatctgttgcgatgttctacaacacgtttattgatttctttagataattcaacctgtacgcctttattatgtttagtcatttataccacctctattattcttctttttttggtgtaacatcttggtcagtaattaaaattttattaaagaatgggctaatggctttaaatgaatagtaatgaatccagtgtgtgacttcatcaaattcaccattatagaatggttgttttaacatgccttttgtgtaacgtttatatttaattgaattaatatccaaaataaaagcgtataaatctgattttggtttaatttcttcaacactatctttaaattcagaaagttttgatacatcgtaagtgaatactgaaccaactggaattgtatcacctttatgagtttgataatcaccgtaagcacgtaagaaattaactgattcatcacttgatacgacaatatctttagtgactttaaaaacaccacctaaatcgtcgaaactaataacatggtctgtaaagtcaatccctgctacttggaaagtgttcgcaatctttgtatctaaaagataagattttaagctatcagtcgttaaaataacaatatcttttaattttgaaacagttgtatattgcccaattgcaccacctgaagcacgatgaacttcattatatttagcactgttgttttgtaagttaagaatagcttcaaaaactttacttgctaaatcttgttttgatgttgctttacgtacatttgattcagataattggtttaatgagtaatcaactaacatcgcacgcatttctttttcttctaatacgttaatatcagaaattttctttttatagacacctaatgcataattagttgcgtctgctaatgtttggaaattgaaacgtgtgtcattgttatttaatgtgaatttttgttttttcacaataccactaccatataacttagtagccatacgtgggtaattacgttttaacattaattcttcgtttttagataagtccatgttaattggtactgtatccataattacatattcttcactgtattgaccgataaagtcctgctctttagctaaccaattaaaacggttacctaatgcaatatcgattaataaagtttcattaatcttagggaataaaaatttatttacaaatgtttcaaacattgtatttgaattatcccacttatcgccaaacgtccatgattttgaataagtatgattaaagtcttgtaatgcagatttagcagactgtgcaactaaaagtgctgtttcgttttttgtactcttttctgccatgatttattattcctcctctacatcgccagtaaatgactgttttgaaagtgaatgaatttgtacaccataactatcttcacttttgtttgtatcaattgacatattttcatttaattctgttcgtttatttaatcttgaatcttcatatgatgtgcccatcatagaacgcatattgttaccctcatacatgtttaaattcctcctaatctaaatctaacttatccactaattcttcatctgaatagtctttgtcgttgtcatctgcttcagtaacatctggttttggttgtggttgtggttgtggttgtggttgttgcatttgtgatgtttcaaaattagtaaatcgttgttctaatgaagcgatacgttgttctaaaacaacagggtctaattttgcactatcttcatcagtaatagtaggttctaatttgttttcattttcttcttcaattgtttctactgttttatcttcagtagattcttcagttgattcttcagttgattcttcagttgattctgaagtttcttctgttgattctgaagtttcttctgttgattcttcagttgattctgaagaatcttctttgtcgtctggttttacgatttcatcgaattctgtcatttagacacctccaaatattttataactaattatatcatagaatatttaaataagtaaattaaatttattttaagttcatatcataaattttgataaaagtcaatagatacataaattttgtatttgatgaatatttaataggttagataagtttgaaaagtagacgcacagtttttataagtttagttt

SEQ ID NO: 4 - DNA, 17898 bp, Unknown
  bacteriophage strain capable of infecting bacteria of the genus Staphylococcus
acatatcatttctaaactaaacttataaaaactgttcaccaacttttccaacttatctaacctattacatattcatcaaatacaaaatttatgtatctattgacttttattcaaaattatgattgaacttaaaatctaatttcttctattaaatagtagttttaaattatttaaatttttttaccttattctattgacaaaacttttaaacgtttgttatactgttaatgtaatcaaaacaaggaggtaacaaaatggaaaatgtaaaacctttacaatcatttttttacaaaatggtgatatagctattcttatgggtgatgaatcaacttatgaagtatcattatttgtaattgaaaaatcttcatttgaacagttagaacataattcacctaaaaaaaattattgatgatatatggagtgataacaatggttaatgttgataatgcaccagaagaaaaaggtcaagcttatactgaaatgttgcaattattcaataaactgattcaatggaatccagcttatactttcgacaatgcaattaacttagtatcagcttgccaacaactattattaaactataacagttctgttgttcaattcttaaatgatgaactaaacaacgaaactaaaccagaatctattttagcttacattgctggtgatgacccaatagaacaatggaatatgcacaaaggattttatgaaacgtataacgtttacgttttttagaaaggagtgatataataatgaaacctgatgatattgttacattacgaattaaaggttatattcttcattatttagatgataataatgaatacatagaggaatttataccttatcacgattatcatttatcaaaacaacaagcaaaagatttaatcccacaatcatatacacttttatctactacacgacatacaaaaactatgcaagtttattacaatgatttactacaaattgcaattgcagaaagcaaataatttaaataagaggagaaataaaaatgacaaacgtaaaagatattttatcaagacaccaaaacacattagcgagattcgaatttgaggaaaaagaaagagaatttatcaaactatcagaattagtagaaaaatacggtatgaaaaaagagtatatcgttagagcattattcacaaacaaagaatcaaaattcggtgagcaaggtgttatcgtcactgacgactataacgtaaacttaccgaatcacttaactgaattaattaaagacatgcgtcaagacgaggacgttgttaacattatcaatgctggtgaagtgcaattcacgatttatgagtatgaaaataaaaaaggtcaaaaaggttattcaatcaactttggacaagtatcattttaataaaatttcataggggatatttatcccctatttttatgaggtgctaaaatggaacgtaaatacaaaacggtattattatattgtgatgagattaaaggtcatttaccacatcaaatagcaatgtttgaagaattatatgacgctaaagttttatactcatattatgaatataatccatttactgaaaaatatgcgtatatgatagaatacattaaggagatataaaatgaaaattacaacaacattaaatacaaaaaacaataatgatttatttactttagatattgacattgatattcatacacattgttttgattttcttattgttttttatagaagatattcaaatccaaattataaaagagaagcatttacagattgcaccattgatgacgtattagaatattttgagaatccattattagctgatattacaataatttataaaaataaggtaatttatgatttaggaaaagtgattgaccatgaataacctattagatattattattgttttccttttagcatttttaattacacttgtaatacttatgacaatgcatatacgtgtgtcatttggtgttttatttactacattgattatattctacattatctttttagtggttatatatggtttatatggaggtcgttagcaatggtgagacatacgtccgaaatggataaatggaaaaaagaaagagacgcaagaaaagagcaggaaaaagaattgtttttaaatgattttagtactgttaattttaaatttgatgataaagatttacaagaggcttacatagacgcatggaaacatttcgcacatttgccctattttccaaaagaaagaaacgtgtcatatgcaaatgctgtatcattggtaagaggtaaaagacatgaacaattaaactatatacttgaaatatataaccgtaaagatgaatctaataataaaaacgctaaaaaacataaatatgctttatatgaattacaagcaaaaaataataattcttctatgtataaatatataaaggaaattgacactttatacaaagaaattggtaaatcagatagaccagtgactactattgatgatgaagatgtgaggtataactttttatattatgcaacatttgaagactaattttaatactgtaaaagacatcataaactattacaaggagcaaaaacatggtgaaacaaaatcgtttaaacatggtaagagattatcaaaatgctgtcaatcatgtcagaaaaaaaataccagataactataatcaaatagaattagttgatgaactcatgaatgatgatatagactattatatatctatttcaaaccgttctgacggaaaatcgttcaactatgtttcattctttatttatttagctataaaacttgatattaaatttactttattatcacgtcattatacattacgtgacgcttatcgtgattttattgaggaaatcatagacaaaaacccactattcaaatctaagcgtgtcacattcagaagcgctagggactatttagcgattatctatcaagataaggaaatcggtgtgattacagatttgaatagtgcaactgatttaaaatatcattctaactttttaaaacactaccctatcattatatatgatgaatttttagcacttgaagatgactatttaattgacgagtgggataagttaaaaacaatttatgaatcaatcgaccgtaaccatggtaatgttgattatatcgacttccctaaaatgtttttattaggtaatgcggtcaacttttcaagtcctatattatccaatttaaatatatataacttattacaaaaacataaaatgaacacatcacgactttacaaaaacatttttttagaaatgcgaagaaacgattacgtaaatgaaaagcgtaacacacgggcattcaattcaaacgatgacgctatgactactggagagtttgaatttaacgaatataatttggcagatgataatttaagaaatcatatcaatcaaaacggtgattttttctatattaaaactgatgaaaaatatataaaaattatgtataatgttgatacttttaatgctaatattattgttataccttatacaaaacaatatgaattttgtactaaaatcaaagatatagatgacaatgttatttatttaagagaagatatgttttataaagaaaacatggagcgttattattacaatccaagcaatttacattttgataacgcttactcaaaaaattacgtggtagataatgatagatatttatatttagatatgaataaaattataaaatttcatataaaaaatgaaatgaagaaaaatatgagtgaatttgaaagaaaagaaaaaatatatgaagataactatatagagaatacaaaaaaatatcttatgagacaatatgaattataaaggtgtgtacgattatggggttactagaatgcatgcaatatcataaacatgaacgtcgaatgattttatactgggatatagaaacattagcgtataataaagttaacggacgaaaaaaaccaaccaaatataaaaacgtaacgtattcagtagcaattggttggtttaatggttatgagattgatgtagaagtatttcctagttttgaatcgttttatgacgcgttttatacgtatgtgaaacgacgtgatacaatcactaagtcaaaaacagatattatcatgattgcacataactgtaataagtatgacaaccattttttacttaaagataccatgcgttattttgataatatcacacgtgaaaatatatatttaaaatctgcagaagaaaacgaacacacactaaaaattcaagaggctactattttagctaaaaatcaaaatgtgattttagaaaaacgtgtgaaatcgtctattaatttagacttaacaatgtttttaaatggatttaaatttaatattattgataactttatgaaaaccaatacatcaattgcaacattaggtaagaaattactcgacggtggttatttaacagaatcacaacttaaaacagatttcaattatacaatttttgataaagataacgatatgtcagatagtgaagcatatgactatgctgtgaaatgttttgcaaaactcacacctgaacaacttacatacattcataatgacgtgattatattaggtatgtgtcatattcattatagtgacatttttccaaattttgactataacaaattaacattctcactaaatattatggaatcgtacttgaataatcaaatgacgtgttttcagttactcaatcaatatcaagatattaaaatatcatatacacattaccatttccatgatatgaatttttatgactatatcaaatcattttatcgtggtggtttaaatatgtataacactaaatacataaacaaacttattgatgagccttgtttttctattgatatcaattccagttatccttatgtgatgtatcatgagaaaattccgacatggttatacttttatgaacattattcagaacctacattaatccctacttttttagatgatgacaattatttttcattatataagattgataaagatgtatttaacaatgatttattaattaaaatcaaatcacgtgtattacgtcaaatgattgtaaaatactataataatgataatgattacgttaatattaatacaaatacattaagaatgattcaagacattacgggtattgattgcacgcatatacgtgttaattcgtttgtgatatatgaatgtgaatactttcatgcacgtgatattatatttcaaaactattatattaaaacacaaggtaagttaaaaaacaaaataaacatgacatcaccttacgactatcatattactgatgacatcaacgaacacccatactcaaatgaggaggttatgttgtctaaagttgtactcaatggtttatatggcatacctgcgttacgttcacattttaacttattccgtttagatgataacaacgaactatataatatcattaacggttacaaaaacactgaacgtaatattttattttctacatttgtcacatcacgttcattgtataacttattagttccattccaatacttaacggaaagtgaaattgacgacaattttatttattgtgatactgatagtttgtatatgaaatccgttgtaaagcccttattgaaccccagtttattcgaccctatatcattaggcaaatgggatattgaaaacgaacagatagataagatgtttgtactcaaccataaaaaatatgcatatgaagtgaatggaaagattaaaatagcttccgctggtataccgaaaaacgcctttgatacaaacgtcgattttgaaacctttgtacgtgaacaattctttgacggtgctataatagaaaacaataaaagtatctataacgaacagggtacgatatcgatttatccgtctaaaacagaaattgtatgtggtaatgtatatgatgaatattttactgatgaacttaatatgaaacgtgaatttatcttaaaagacgctagagaaaattttgaccatagtcaatttgatgatattctttatattgaaagtgacatcggttcattctcacttaatgacttatttccagttgtacgttcagtaaataataaatcaaatttaaatatattaaaaatgcaacacgatgacatcaaaaaaggcaactgttaaaataacagtcgcctttttattttgagataacatgaaaaatgtgtacgaaaattgattatgttttgtattttatttactagcattactagcatgttttcattatagcatagttaattaagcaataccactgaagaatacaatattatcaccagcgttatgaggtacaccattaatcaatgtatataatacaacccgtgacggtgccacgtatggtggtacgttatagtttgctactaagaatgaaccatcgtcaaatactgctacaacgacacctgtgtgaccaatgccatatgctgttgcttgtaagtagggtggtttacttgaaaagccataaccgacagtaggattgtgcgttgttttagcacctaactttttataaacataccacacacgttgaccgtttgttatttgtccgtcgtcggtaggttgtcttttgccatgtagttgtgacatatacgcccatgttaattctgtacactgccctgcattacctgtttgaggaaatatgttaccgggtttgtataagtattcttttttgaataaaggtacaccaattgcttttttatatttttctggtaactgtgcatacgtccagttaccaccaatgacgcgaccacttttaccattaggtttgactgatttaccactaattggtttatggtctccgtcatcatcagtaggatttgaactactacccccactatctacttgcacgctatcaatcagtttttttaatgaatcgagtagcccaatcgtcattttaatatgatatgtgttgttaaatgttttttgtaatgtaaaataatcattactaaaaaatttgtcgctacctatactgtgtacatcccattgtaatgcatcttgtactttttttaataattcttgcatggcttgttttgctaaagcgagcagtgaactaccactgtcgccactactaccactgtcagacgaatcactaggtgaaccacctttaccgtctaattttccaccccatgctagaatagcatttgcaccgtctaaaaatggattaccatagttttgtactttattatatgatgctttcaaacccggtggataatatgccgcccaagtagctgcagctgttaatggaatatacgcacgtccaattgtacctgatttcatatttttagcaaaatctgcattaccttttctttgtacgtcttgtggtacaaaatgtactggattaccgtaatcataccaagacggttgcccagcttgttttgattgtgatactaattttcttgctatgaatttagcgtctgttaaataatcaccacgtgcagacgtatgatttaaccaacctaaaccagcactataaccctcatttttttcatatacggcaaaaagagtaggtgatacacctatctcttttactgcttttaatacttgtctgattttactttcattaccaccaagccatacattaaagcgcccatatccttttactttaggtactaactggtctatcgttaaaccaaaatcatcattaatataggaatgtgtaaatttatctatcttctcttggtcgttcattgttatcactcttttcagtatcgtttttaattacttttaatttatctttaatttgttcaggcactaatacgtccatttctgcacaattttctacaatagataaaccctcattagcgatataatagaaaatcgtaatcatgagtagcccaccttttaattgtaaaatttggtcaatgatgttagctaaaatgataatacagaatatcaataattttttagcaaaacctttcattgattttttagaccataagttattatttttaatagctttagcaaaacctgtaataatatcaacaaacattaatacaaataaaaaataaagtaattttaaatccccagcatatataaacatgtgaaacgcatctgagtctgtaaatctgaattttacttcgttcatattatacaccctctctaaatttgttatttaacggattctgtaacattggattacctgaaccgtcattatgccaaaatctcacacccgattctaaaattgcttttaattgttccattaacatagggtcaatgtcacgtatagtataagtacctgtacattttaaataattgcaaacagtcatactgttaattggttcaataaatgaattatagtcattcacttcaaaaccaaacaacatataatatttttgtaaaaatgtaatttctttaggtgacggtacactaattttcatcgttaaaccgttaatactgtttgcaatttggaatgcgttgcccatttccgactcagtcacagacggtggttgtaatgctaaatctttatattctgcttgttgttgtttgtagaaattatattcttcattaaacttaccaaataaagcagtcggacttaaattacttgctacacttactgcgtcataaaaacgtgattttgggtcgctaccatttaatacattatctatacgacttgtgattaattgactttcagcattacgctgtctattggcttgttgtgattgtcctaaaattccgttattaattaatataggcacttgcgcaaaactattaaatgttatatttgtatttaagaatgaacctgtatcaattaatatatctttattttttgcgagaatcggtctatcgttttcagcactgttataatctactggatatactcgaacttcattatgataaccaatgattgactttgtacgtaacttaacacctgttttttgtgaaatcttaccagcgtcgagtaacatcgtattcccgttccaatcataaaattcaatcgtcatatattcattacgtatcatatgtttaaactcgtcttttttagacaacatcatctcttgaagctttgtgaaacttaatgataaatcgtttaaactccattcttttgattttccaccttgttttaacgtctttaatccagtaattttttcacttgtcttaacgtcctctaaatcttttgtattaataaagtctttaggtaacatttgaactttttgaaagttttgtgtaatccatggatatgcactcattttatccataaagttaataaagtctccatattccataacgtataagttgactggtgatgtgatattgtcatatatcgtacccttagacgtatctaagtttggctcttttttcgtaccaaatttctttgataaatcagcgcttgactggaataacactaaattttccaaatactgttgcatttggttatacacatagtttttattcgatacttttaacacatcatcattgttacgtaacattggtaacatatagttatacgtgcgttttgataagtgttgacgttcaatattaacgtttgagagttgctctaatacattcccttgtgtatacgtcataatagtatcaataacaaaatatattttaacaacaacgtcatttacgtattcgatttggttaacaaatgcgtaataacgtctgtcctcaaaatctgataaaaatgtcatatagttaatcccttgtgcgtcatgccactgcatatcaacattgatttccattctatcacgtataaaattatatggttgttttgaatagtctaatgatttaaaatgacgaccgtttaaaaaataatcatcacgctctttattactattaaaatgaatcgtattttgatagtctgtaaacggcgtgttatagaaaaatttaaaatttgttaattttctcatttttacctccataaaatagtcgtataaataatttatacgactattataacatttttattcaatgatttgtgtatctattgcaaaacgtttatcaccatttgaaagctcactatcgctataatttgatgtaacaaaatgtaattcattgttaaagtttaaatataatcttgtattaatcattttattatcaatcgcacattgtgtgtagtgatgtgttgattttaagtttgcgttaatcgtacctaatttaatatcaccgtttttcttaatcccttttaataccccttttaattgtatggttttaacaccattaattgttacaatacgatattgtggtgctggataaccaccattgctatcacttgcaactataccactttcgagcgatatatcttgccaacctgtatcgttaaattgtaattttgcactgttaattttttgatcaaaattttgttcaatttctgatttagattgagcaattttattatctatatttaagttattcacttttgttgataaactgttaatacttgattcgtttgttgatgttttttgttttaaatcactaatatcattatcatatttagataaatcaacgttaccgttactgtcaacaactggtctatcttttaattcttgaatatctttttcaatttttgatattttatcattatttgtttttaaagtagcgatgtcagatttaattgaattaatatcctgtgtataatctttttggttaatactgtttaattttgtttataactcttttatcttatcaaggttggcatttgctttgatgtcattaatggtttgttctaaactttcaagtttcccagcacttgaattttgttttaacttattaatatcctcttgtatttcttgaattgttttgtcattgttttgtttagattttaataattcaatttgactttctatctcttttattttatcaaggttgacactttttttaacttcagctaattctatttttaaagcgtcaatgttttcagcaccagtatttgctttaattaaattaatgtcatttgtgttacgtcctacactatctttagtagcgtttaatgattgtgtaagtgtctgatatttatcatcatattgtaacattaatttttcgaattcatttaattgtgtttgatgttgttctaaactttcatttaatatgacatctttttcttttaatgaatcaatctcttttttattactatcaatcattggttggaatttttttatcttctctaaaaatgttgatattttttctttgttatcattaattgcaatatcatgatgttctatttgaccactatatttatcaatcaatgtttttaaatcattataaaatgtcaatttataataacttgaatcagtacggacataaatatgcccgtctgatgtactgattaagtcattttcttctgttaaaaaatctgctaaacgttcaattgtttcaacttgtcttaaacttcttacgattctatcagccattgtctacacctcttatttgtatcgtttccaactaaattcaaagaaaaaacctaaaatacccattatgagaacaccccccaaggaataccaacactgtaactattacctgttttaccattccattgacgaaccggtaaataataacgtgtcccttgccaattgtaaccaatccatacatacccgtctgataaacaaacttcgtcatatgttgtatagccgtttggttgaaaccaataaccgttaggttcacttaattttggactaccgacacgtgcaaatattggtaaaaatccacatgtaaatgtcgcattttcatttctgtaatatgtgccgtattggttttgtttccaatttccaaatgtgtttacttttgatgtttctaatgcgttgctattactagcagaaaatttaggtcgaataaagtgtgttacaccgtcataataatgtgttctaattgttgctttttcccaaccgtcaaagccaccacctaaccagttttgttctagacatgtataataatctaaattaccacttaacacacattgaatatgtccatattgtccatttgtatatactgcgacgtcacctaattttggtttaaagttcggtgtattttcatacaccgtcgctaaacctttaaagtcattattaatcgcgtctttggcattgccccacatacgaactttaccgtctgtaatgtaatatatataagcaactgctaagtcagcacattgataaccaaatgctaaatcaaagtcaatgccgacaccctcatgattatataaccattcttttgcttgttgttgtgatttcatttatatcactcctatttttgatgttttgctacccaaccatattcacgatgtttcgtttcagcattaacattactaaagaattctttatggtctttaacattagcctctaatgtttgccttacttcaccaacggcgttaccacttgaaacacgtaaccatgcacccacttttttaatttcttctggtgcgtctctaaacaattccatttggttaccagtgatataatattcaccgggcgtagtaacgtaagcaatccagttattgtactgacttgcctccaaatattcttgatatggtgcgtctgttttgattgttgtccataaaccataatcccattttaatgtaaatacgtcgagtgtcataccacgcaccattttaaccattttacgacctgttgagaaacgtgttaattcttgcacagtacctaatgtttgtgttgtagggtatacattaatgaaacaaccagcgtcaatgatacgcttactaccattcattggcatatttttaagtttttctgcagtaccaccgtcaatataataaaaacctgcttgcgttaaattgtttaaatcgtcgatatggtctggaatagataacgcacgaccgtcgtcttttgttaatttatagttttgtgaacctcttgcgcgtaatgcttcaaagtgttcatattctccaagttggaagaaaccgtataaattattgaaacgttttccacctccaccatttgtcatagcaagtaataacgatttacgttttgtttttggattagtataaatacaaataccctcaggctctttaaagttatcacgtgggaaattaattccgtcttgatatgataatttaaacggataatcataaatcttttgacgtgttgttaatgaatatttaccaatttgaacgtgtgaattaactgaactgttaccacttaaccagtataaatcatcaccgtcaacagcaatcccttgcatccaacgattatcattgttttctgaattatcaatcgtcatttctttttctacattatcaatgtgattttttacgtcagctcttgaacgcacctgtattgtcccgtcaccgaatcttaaaatgagtttgtcatttgcttcatcaattaacggtgtaaacgtgtgtttgtttaaaagtgactgtggtgtataatctgttaaccctttagcctcttctaaatctaaaatataattatctttatatgcgacttgtaacagttttgctacaccgtcatgatgtaaccatattttcatttcaccgttagattgtctttctaaacctattgtagtaccgtgaccaccttgtacaatacgcatactagaaattaagtcaccgctaggcgttaatttattaatccaaaaaccttctggtttttgtgaatctgattgtgtagagtacatttgattcgtttctttatcgatattaatggattggtttactgcgttacgaataccaccgaagcccataacaaactttggttcaagctcatttaattcaaacccattaacgaaacggtcaatgtctttaattaggtctttcacttctgctttaaaatcattcatttgtttcatttctgcgactttaaataatgcaaatgcagatgttaaaccagcactatatttagtaaactcatcgtgaatgattttatcaatcgtaccgtcgtttaaccaacctctaaataagtcttttgcttggtctggaaatgctttcattaagtcgtcccaatttttgaaacgtttttttaattcaccgtcatattcccaaatacgacgtgctaatacttcaatgagctttgataatcttgaaatataatcataatatgattttgaattggtattataatctgctctatcatcgtaaaacggtgtataacgttctctcgttttatatatttcgtctaagaatggacgaatgtcatcaaaatatttaaaatcgttttcattatatgccattatttaaccacctttaccaaatttgtaaaaaacattttttatcaaattcatttaaaattttctttcttaaatcgtatactttatcaatattatcaattaaatactgttttgaaaattgtgtacctttcgcattacctttttgattttgatttcgtttagcgttttgattactttcgttacttgatttattcacagttttaccgttatcaatcgtgttattgtctgcaaattgtaacgttgttttatcaacatcaatgttaacctcgctttgtggtaatgacgcataagcatttctgtttgctgtcataccagttgaattgtctaaagatgtagcattttgatttgaggtttcgtcggtgttgcttgttgtatcttcgttgtgttctgtgaagccttgtgattgaagatatttttctacttcacttgatgaataaaccacattcaaataatcctcatgtgtgatacatacagtaatcacttgcataccaaacgcttcaactgtttgtctgttgatttctctatctaaaaagtgtattgtaaatgattttttgaaaagtaagtcagataagtcatctttaagtttaaaacctttaaacactttttcattaacgattgataaaacgtctttgtcaaacttcaacattttttgcatgaattgaaattcatcatcataaaacgttaatttatcattatttacaaattcgttaaaaccttttttaattaattctgatttaataaaatcaaataaagtcattgtatatctagccattgtattcactactttcatcattagacaatgaatctatcattgtaatttctgaagttacttcatcatcgtaatacggtttaatatctaaaccataacgttttgataagaatgtaatcggttcacgaccttttaaataaatattactattagatgtagtaaaacctcggttacttttagcttcttcgtccgaaacaccgctttctttatctactgcaagcgaatttatacctaaatagttacttaattcactaattttattttgatattctcgtttcatctcagttagtgctggaatcacactattactggttaaatctatgatatcatcatcagcattaaacataggtgacattttaacaaatggtgcgccgttgtatatttcagatacaagttgattaactgattcatcattaatgtctgatttaaatattttgctaaattttgcttgcataattaatgaaaatcgagataaaacaacctcagataattcatcagtataatgttctataatttctatatcactattatattgaattggcttattttgcatgacaacaaagttgccactcatacagttatcatatattttatgaatctgtaagcattcatctggtattaaatagtctggaacaatgaaataaatatcttcttttgttaatcgtttttgaaattgaaaattgaaatttgatgaaaagtttggggcttgattaaaataagtgttgttaacatagcccaaaatcatgatttgttcatttcttgctttaccaacaacaacattaatgttttgccttaatgcagattctaattgaataaaatctataccaaccgaatctcgattggtatagttaattaatagtggtaaaaattccaaataacgattaaacataagacgtttaaatctgttgcgatgttctacaacacgtttattgatttctttagataattcaacctgtacgcctttattatgtttagtcatttataccacctctattattcttctttttttggtgtaacatcttggtcagtaattaaaattttattaaagaatgggctaatggctttaaatgaatagtaatgaatccagtgtgtgacttcatcaaattcaccattatagaatggttgttttaacatgccttttgtgtaacgtttatatttaattgaattaatatccaaaataaaagcgtataaatctgattttggtttaatttcttcaacactatctttaaattcagaaagttttgatacatcgtaagtgaatactgaaccaactggaattgtatcacctttatgagtttgataatcaccgtaagcacgtaagaaattaactgattcatcacttgatacgacaatatctttagtgactttaaaaacaccacctaaatcgtcgaaactaataacatggtctgtaaagtcaatccctgctacttggaaagtgttcgcaatctttgtatctaaaagataagattttaagctatcagtcgttaaaataacaatatcttttaattttgaaacagttgtatattgcccaattgcaccacctgaagcacgatgaacttcattatatttagcactgttgttttgtaagttaagaatagcttcaaaaactttacttgctaaatcttgttttgatgttgctttacgtacatttgattcagataattggtttaatgagtaatcaactaacatcgcacgcatttctttttcttctaatacgttaatatcagaaattttctttttatagacacctaatgcataattagttgcgtctgctaatgtttggaaattgaaacgtgtgtcattgttatttaatgtgaatttttgttttttcacaataccactaccatataacttagtagccatacgtgggtaattacgttttaacattaattcttcgtttttagataagtccatgttaattggtactgtatccataattacatattcttcactgtattgaccgataaagtcctgctctttagctaaccaattaaaacggttacctaatgcaatatcgattaataaagtttcattaatcttagggaataaaaatttatttacaaatgtttcaaacattgtatttgaattatcccacttatcgccaaacgtccatgattttgaataagtatgattaaagtcttgtaatgcagatttagcagactgtgcaactaaaagtgctgtttcgttttttgtactcttttctgccatgatttattattcctcctctacatcgccagtaaatgactgttttgaaagtgaatgaatttgtacaccataactatcttcacttttgtttgtatcaattgacatattttcatttaattctgttcgtttatttaatcttgaatcttcatatgatgtgcccatcatagaacgcatattgttaccctcatacatgtttaaattcctcctaatctaaatctaacttatccactaattcttcatctgaatagtctttgtcgttgtcatctgcttcagtaacatctggttttggttgtggttgtggttgtggttgtggttgttgcatttgtgatgtttcaaaattagtaaatcgttgttctaatgaagcgatacgttgttctaaaacaacagggtctaattttgcactatcttcatcagtaatagtaggttctaatttgttttcattttcttcttcaattgtttctactgttttatcttcagtagattcttcagttgattcttcagttgattcttcagttgattctgaagtttcttctgttgattctgaagtttcttctgttgattcttcagttgattctgaagaatcttctttgtcgtctggttttacgatttcatcgaattctgtcatttagacacctccaaatattttataactaattatatcatagaatatttaaataagtaaattaaatttattttaagttcatatcataaattttgataaaagtcaatagatacataaattttgtatttgatgaatatttaataggttagataagtttgaaaagtagacgcacagtttttataagtttagtttagaaatgatatgt

SEQ ID NO: 5 - DNA, 137709 bp, Unknown
  bacteriophage strain capable of infecting bacteria of the genus Staphylococcus
gagaataaaaaatgacaaataaattaagagctatccatgaagaaatgaaaattgagttacataaattcccacagaatgtagatttaacaagtaagacaactgctatcgcaatcaatcaaattctttacaagtttaaaaccttaacggaacaagcaggtaaaatcactaaaaagtattttgagggtcaagagattttgacgattgattttgaatattatgactcacttcaagattactacatttacttacttaaaaatagtgaaacaattgaacaaaggttacaagaaattgaaaaaagagtagctgaatatgttaagtaatttggagttataaccacattatgttatactgtatgtgtataaaaaacataagttagctgttatattaattatgagaaaataataaaggatggataaagaattggaaaaagaacaaaaagatattaaagatatgacacctgaagaaattgatgaattaaaatatcagcaacaaaaagataaagagcgtgttattaacaaagtaattaaaggtgttaatgatgtatgggagaaagaatacaactttgaagaattagatttaaaattcaaagtaaaaattagattacctaatgctagagaacaaggtaatatcatggctttacgttctgcatacttaggtggaatggatgcttatcaatctgaccaagttattaatgcttatcagatgttagctactctacaagaagtaggggtagaagtacctaaagaatttagagaccctgaagagatttataacctaactccacttgctattatgtgggatgattggttagactttatgacgtcctttcgttactagtaacgtaaagaagttaaatgaagatatagaacggttaggtggactttcacatatagctagagagcctttatcaagaaacttatgggctatcatgcgtgagtttaatgtgctacctaccgaaaaacgttttaaagatttagatgattaccaaatagagtttattatagctaacatgaatttagatacaaaagaaatgatggaagctagagacggtaaaaactatgatatgaaagcggaagacgtagacacatcatggttcgaagcgccgacagatgaatttgatgttgttcctgatttcttagacttagatgatttaaatacacaagtagataaaagtttaagtgagaaagaaaagatagaaagagatagacgagttgaagctgagttagaagatgaaaccgagggattaacaactcaacatttagctatgatggaacacataagacaaaaacaaaaagagcttgatgaaagtttaggtattgataacaaagaaacaacacaagaagatataaacaaagcaatagaagatgtagatgattggtacatgtagggtaatggtataacaccaatacccttattttttgattaggtggtgaatactgtttggcaatgaatgacgattataggttggtcttgactggtgatagttctagcttagaacaaagtttaaaagctatagagatgtacatggatgcgttagagtctaaaaacatagatgcaccattaacaaacttcttagagaaattaaaagtaatagcaaaagaagtaaaatctgtacaaaacattatggataaacaaagtgataagtctttaatatcaccaaaagctatggatgaggctattagttctacacagaatgtaactaagaatataaacgacctaaagaaagctttaaatgacatacaaacagataatattacaaagggtatagctcctgaccctgaagtagagaaagtatatagtaaacttaataagacactaaataatacacaaacagaactagagaaagtagcatctcaaaagattggttcagactcagatataacaaacagaataaaagaaatgaaaacactgaaccaagttacagaagagtataataaattagtaaaagatgccagttcagctaaggagtacacaaagcaactaagagctaatcgtaatatggttagaggtcatatatctaggtctgaaggctctaatagaatgtcctatgaccaaggtgctagagtacgttctgaattaggtaaagtagacacttttgaaaagcaacgagaagctaacaatagaagaataaaagaaaaccaagatagatatagaggttatagacaacaacaacaagatttagtaggcaaaagagctcgtggtgaaataagttctgaggattataaaaaacaatcagcttctattaaaatgatgattgatgaaagtgaaaagctttctgaagtttatagaaaaacaggtgctgaattagacaagtcaatcaactactataaaaatagtgctaaaaaacagtttgctcagcgtgagatagaacagcaacgaggaacaatgggtaaattgttccaagatagattaccatctattggtgcacatgctactatggcagtaactgctcttgcaggtggtatgtatatgaaaggtgcctccttatccgaggcaaatagacctatggtaacatcattaggacaaaattcagataatatggatatagacgcagtaagaaatacatatggagatttgtcaatagataataagcttggttataattcaactgacatgctaaaaatggctacgtcatatgaaagttctataggacataaaagcgatgcagatacgtataaaggagctaaacagttagctgtaggtggtcgttcattaggtatacaagaccaagaagcttatcagcaatccatgtcacaacttatgcatacaggtggcgtaaactcagataatatgaaagctatgcaagatgcttttttaggtggtatacgtgaatctgatatggttggtagacaagacgagcaattaagagctttaagtactattgccgagcagtcaggacaaggtagaacattatctaaaggagaaatgtctaatcttacttctctacaagctcaagtagcgggtacaggtagtaaaggtctacaaggtgcacaaggagctcaagccttaagtagtattgaccaaggtattaaaaatggtatgggtaattcttatactagattagcaatgggatggggtactaagtaccaaggattagaaggtatgcatgacttacaagcacaaatggataaaggtatatcagaccctaataacttagttaatatatttgaccaagctaataatataggaagtacaacaaaagaaaaacaagccatagctaaaaaaggctttgaaagcatgggagctaacttaacacaagagcaaacagatgagttgtacaatctttacgcctcaggtaaactatctaaagaagagttagctagtaaagctaagagcatggaacaagaaggctctaaagcaggagataaaaataaggataagtattccgagtctaaagcaggtagaaatgaccataacaaagctaagacagatgataaagctgaggatatttatgacttagctcaacctattagagatgttcatagtgctatggcaagcttgccagctcctttatacctagcttcaggagcagtacttgcctttgtagcatctttagctaaatctactgccatgatggctggtggttctttattaggtaaaggtcaaaaaggactaaaagattggtttaataaccgtaaaggaggttcaacaggtaagactggtggtggtaaacctggtggtaatcctaacggtggtggacgctttagaggacttaaaaacttagctgacactatactaggtgataaccctagaggtggataccgaccatttaaagaccaagcaaaaggagcaggacaaactgctaaaagcatgggtaaaaccttatttgatacctttggaaaaagagattttacttttggtgaatatatgggaagaaccaaagacctaggtaaaggtgcatggaacaaaggtaagggagcttttggtaaagctaaaggtaaatttagcggtaaaggttctgacttaggttttatgtcacaagcacctactgctaacgcaggaggtcttggtaaactaggtggtcttacaagtaagctaggttggattggtgcaggtctatcggcgtttgatataggtagttctttaatacaaggagatactaaagaagcttcttctaaatttggtaatactataggaagtattatagacccgttaaatttaggctatggagatggcttaagagattatgctacgaaaacagcggaaggttctatgacaagtgatggttggaaattatggtctaatggagataaagatggtaagaataaattccaagactctcctgtaggtaaactatggggtggcataacagatttcttcacaccagataacccttctaaattagacgagacagtgaaaaataaaaaaggtaacataattagttatatactaattgccttgcttatagagcaatctgtaagtaccgagtgttaactgctatgaaactactaaagctaactaaactacaaagtaagtcgaaagactaagcttgaatgttgagaaatcagaaaaaattagttagatactctaaggttaaatcctaaggagaagtacaatgggtgtatagcatcgaaagtcctaaagacctgaaaggtctacggaacacgttcaacgactattccgtataggtgacggaagtaaaaccacaagctattggtggaagaaaaatactcaccctataaaatagggataacaaatagtctgcacacgtagggaaacctagtgtctagaaataactagagaatatacagtagcgtgtatatttaaacattgttaaaatatataaataattaaaatttgtattctacttctgcatataaacctttcttattttgtaaggtaaacttgttattaaataaatatacataactaatacgataggttatatatgaaagtatactattgtttatatgttttaacttatggtattaatgataaatcacaaagtaaagacaggcaaaaagcagaagaaaaaagagaaaagaataatgattctagagaaggaaatgtaacagtatactcacatttcttagaccatttagcagacaatctaacaaataaaggcagtagttccgacaatagttcatcaggaggaacacttgactatcttgatggtaagaactttacagataaagacgtaactaagcatgacttaggtaaaactgctaaaggtgtaaacgccgaaatgttaaataaatggattgagtctcaagcacctagtaattctaaaatgcgtggtttaggtgagctttatatgaaagcaggtaaagagtcaggacttgacccaaggtatttagtagcacatagtgctgttgagacaggctggggaacatcaaatctttccaaaggaggagaccctaacaaaggtaactggttcggtataggtgcttttgataacaatcctaataatggttttaactatggtttgggtattgttggtggtgctaaatggattagagacaatttctacaacaaaggacaaaagaacttacacgatatgagacacaacaatggtgttcatgaatatgcaacagcaggtaattgggatactatgattgccagtattatgaaaggttcagacaagttcataggtggcggaggtggaggcagtgatgttatgcctagacatgctctaaaaaacgaccatcaaccaaagaatcttaaatataacatagaagtacctaaaagtaaaaaccctaatgaaacagggaaagcaataggtagaaaattaaaacaattattagaatctaatttttagaatacaattataatacttatatattttaacaaatggtataaataataaaaaacagaaaatgtctacagaacaactaagagaaaagaataataaatcagaaactaaaaacttaaaaacttacagtaacctattagataaagcacaacaaattatagaagatgctaaagcgctagactcaggaggttcagacagtagttctgactcagggggttcagcttccgatgtagatggagaaggtgcgggtaagatttacaaattccttaaaggtaaaggtttatccgataaccaagtaggtgccgttatgggtaaccttaagcaagaatcagggcttgaccctaatgcaaagaacgcctctagtggtgcttttggcattgcacaatggttaggtagtaggaaatcagaccttgatagctttgctaaatctaaaggtaagaagtctaatgacttagacgcacagttagatttcttatggaaagaaatgagttctggtcaaaatagtgatatgcttaaaaatgcaggatggagtaaaagtggtagtttagaaaaaaatacaaaagcttttgcacaaggttttgagcgtatgggtgctggagaggctatgatgagtactcgagtaaataacgctaaaagttatgtaagcaaatacggtaagtcaggtggcggtggcggtggagctataccatcatcatatacgtccgtattaagaaacccgatacttagtagtgcttcaggaagtactgcatctcaaaataatgtatctgtgaatgttagcattacaggaacaaatgacaaaagggatgctgaagaaataggtaaaggcattaagtctacttttggagatgacttagatattttctcaaacacatataaacgtaattactagggtagtattattaagtactaccctttatataaagaaaaaggaagtacaagtatgtatagaattagacgtcctaagatacgaatagaaatagtaacagatgataatacatttacattaaagtttgaagatactaaagattacaacggcaatcaatttgcttcaaagttacttagttttcaaactaagaatgctatggaagatgatagtgctgtattccaaataactatggcaggggatacgtattgggataagctagtaatggcaaatgatattattaagatatatattacgcctaataatgaccataaagataaagagggaaaccaagagaaacttatacaagtaggtatggtatctcaagtatctaaagtaggtagttatggtaatgaccaagtacaatttagaataacaggtcaatcatttgtaaaaccttttatgaagtttggtttaggtgttattcaagaggtacaagctgtattaccaactgttggttggttagttgatggcgatggagagaatcaggttaaatttacaggtagttccgctaaagatgtaatgcaaggtattatacaacgatttattccttacatgaagtacaattatacggataaaacatacaacacattagagagttacttagattatgatgatttatctagttgggatgagtatgaaaagttaactgaagtttctgcttttactaacttcgatggtacattaaaacaacttatggacttagtaactgctagaccttttaatgagttattctttagaaattcagataaacataaaggtaaagcacagctagtattaagaaaaactccttttaatccaactgaatggaaagcactagaatacatagttgtaccaactgatgattttatagaggaggatgtaggtaagagtgatgtagaaacctactctatctttacagtaaaaccagcaggtatgttaaaagaattaacaggggatgtattctctaaacctcaatttcaccaagaattagtagatagatacgggtattctaaatatgaaacagaaaacctatacataggaactaagagtggtagtgctacagaagatagtgaaactacaggtggagataacggtcatgaacgagtaacttatgacagactacttaaagatttaaataactatggtagagagtccatatctaaaggattagataaatactctagtaagatatcatcaaagtacaacaatattactaaacctgaagtaaagagtattttagagtcttacataaaaaaaggtaatttaagtaaagaagattatgaaaagataacaaagaataatacttcaagagaatcagtatctgatactagaccaaagttaacaaaagaaaaattaaagtctatattagcggaaaagtttaataaaaaagaaacttttgatgataaagatttaaataagaaaacaacaaaagctgtaatagatgatattacaaagaattataaatatggtaatcctacacatgctaagaaactactagaggattacactagatttaaaggtaacccacctacaagtaccacaggtgatatttatgataagtatcttaaagccgtagaaggagtagctaatgttgctagagatacaggttctgacgcaagtgatgaccctttaattatatttactaaaatgctatttaattggtatcactcaaaccctaatttttatgcaggtaatattgttgtattaggtgaccctaagtatgacctaggtaaacggttatttataaaagataaacaacgaggggatatatgggagttttacatagagtccatagaacataagtttgattataaacaaggatactttactacaataggagtaacaagaggactaaaagatgctattataaaagatggtgaaggaagcaaacataggtttaaaggactatggaatcagtcatctgactttatgggtggtcttatgggtgaagagacatctaaagaattaaaagaaaaaggtgtagccgagaagaaaacaaaaggaaataaagatggagattctgacggaggcgcacaagatggaggtaccttagcttcactagaaaaatataatggtaagttgcctaaacacgacccaaattttgttcaaccaggaaacaggcattacaaatatcaatgtacatggtatgcttataatagacgtggtgagttaggtattcctgttccgttatggggtaacaataagttacaattaaatttaaaaagatatatttaatataaactttgcccttatcattcagcaatgagtgataatccaaggttaaatgctatgaaatcctaaagctaactaaactaaaacagaaagagaaatcttagatggaaaagttacgaaagtagaaaaaattagttagatacgttaaggttaaatcctaagacgaagaacaatggaagtatagcagggaaagtcctaagttcaaatgaataaggaagaccctcaacgactatctcctgacgggagagtaaaaccacaagtgattggtggaagaaaaatcttgcccttatataagtaaggtgaacaaatagtctgcactcgtcttgaaaaagagagcatgtgaataaacacagggttatagagtagcgtttataactaaacactgttaaaacttataaataattagaattttattccaaataactgttgacaatacatctaatttatgatatctttatatcataaaggaggtgaaaacaatgtcagataaaaaaacgtatagaggtataacactaaaagtaaaccctacccaagaacaagaagagttaatgtggaaacatgtaaaccattctagatttatttataattatatgctagaaagatattggaaagctctcgataacggtaaatatatagaccataaaaatatgatttctatactaaaagaaataaagaatgatgataagtatagtttcttaaatgaagtatctagaaaaaccttagttggtaaaatagatgacttaagagaaacattaataaaatatcataatcatgaaattagaaaacctaaatttaagtctaagaaaagggaatctaagaggtttcctattagatatgaccgaatgcactttaacaaagaaaaacatgttaaagttgaaaaattaggttacttaagaatttctaatggtacatataaaaataataaatcagtactagagaatgaaagcattaaacctttaaaccctaaatgttactatgatggtaaatattggtatatatctttttcaattgaagtagataatcaatacaagaaagaaaaggataatactaacgaagtcataggtatagacttaggtattaaaacattagctacttgttctaatggtaaatcttataaaaatattaataaaagttttaaagttaaaaaactagaaaagaagttatctaggttacaaagacaattatcaagaaagtatgaaatgaataagcaaggtaagaagtttattaaaactaataatattattaagttagaaaaagaaataaaactcttacatagaaaacttagtaatattagaaataatcatattcatactacgactaaagaaatagtagaacaatatcctagtgaaatagtaatagaagacttaaaggtaagtaacttaagaaaaaataaacatttatctaatagtatttctaaagctaattggtatacaattagagaataccttacttataaatgtgaagatagaggaatattacttactattgctaaccagtactacccaagttctcaaacttgtagtaactgtggtaatcatttaactaaacaagataaactgtctttatcacaaagaacatataaatgttcttgtggaactaatctagatagagacttaaacgctagttataacttaaagaactatagatactccaaatggtatcacaatcatgttttaactaaataaaacagtaaacatgatatgtagggttccgtaaacccgaattaacgcctttggagtattataacaaacctaagtagagtaaatgaatatattaatttactcaaaaagggatacgttgaaaaaggaataaaaatttataattatttataagttttaacttacggtgatgcggcggattggattggcggtgctaaaagtgctggttatagtgtaggtagaacacctaaacaaggagcttgtgttatatggcagagaggcgctcctggcggaagccctcagtatggacatgttgcttttgtagaaaaagtattagacggtggcgctagtatatttatatcagaacataattatgcaactcctaatggctatggtacaagaacaatagacatgagttcagcaataggtaaaggtgctcaatttatatatgataaaggataattgatatggcaacggataaacaagttaaagatgttatagataaatttatagataatcttttcaattttgaagtattaaccaaagaaaaggttgaagaaaaagataaggaagttaaaaagataactacagaagacgtatataataaagttgtttatattagaccatatgtaggtgttatacaaagtataacacctagacaagtaacatatgatagttttactaataatggtacagatatagaagctaaactcacacttagaaaaataagttatactactgataatctcacagtacctactgatgcattatcaacttgtatggtacatatggtagaaagaaatggtgtacttgttatagattactttgatgagttacagaacatactgtatggtagctacatggagaatgagcatatatttgatgaagatgttccagttagtacattagtaacattagacttgaaagataatttaagtagttataaacatatacaatatatgtttaaagggaatgcggataaaaacccttttgaaagtaaggatatagtacctttagatacatacaacttattatattggatgtataaaaagagaaatgtagagctaaaaaatccattaacagttaactacttcttcacaggtaaaagcttctatactatatttggtaaaggacacaaatataaagttgatattgacaaattcaaaataggtgatatactattctttggacgtagtgatgataatatagggatatacataggagataagaagtttatttctcttatgggtacatttcctaaagataacacctctattagtacctataagttagacgattattgggatgactttaatggtagggttatgaggtttgatgaggatgatatagcatggtggtaagattacaatcttctttaggtagaagtttaaaaaagatagactcagaagaacttaatgttaaaggtctattattaggtacagtaagcaaaataaattataagtaccaaactgtagaagttaaaataaatagcttaacattaggacataatcctagtgatgatggtaagttagctgttccttatcctaaagattatgtaggaagaacacctgaaggtagcatgtatggcagtaatactttaataacggaaggaactactgtactgttaggatttattaatgatgacattaattaccctattatactatctatctatggtaatacagaagcaaaccaacttataaatacgaatcctttagagggtggtaaaatgagtaatgatgatgtttataaatacagtagtgctttgtattctatattacctgacctaacttatacatataaagatggtgaaggtacatctataaaaacattcaatggtaaatctttcttatccattacttcaggtgataaagaaaaacccttatcttcagacttttatacaggtactgaataccaagacttatttccatcatactatagtaacaaaaatttaatagaaccgagaatacaaaaagcacctaacatgctatttaaacaccagggtctatactttgatgatggttctgaagataatcatgttacaactttatttatttccgaaaaaggtgatgtaagagcttcagtattagacaaaagcacacaaaaaagaacaacacaagagatgtctcacgatggttcttatagagttataaagcaagatgatgacctattattagactcagcgcaagtatgggtagagtttggtataaatgataataatgtgttttacataaaaaaccctaagcatatgtttgaatttaatgataaaggtatatatttagatgataagccaattttagatacgttagatgctagcattacagagtctatagatagacttaaggaagtacagaaagaattagatgacattaactacttacttgaaggtgtaggtaaagaaaacttagaggagttaatccaagagactaaaaaatctatagaagtttctagtaaggcaagtagcgatgttacgactatgaaatctcaaatatctaatgtaagtagtagagctgagggtattattacacagtttcaagagtttagagacaaaacatttaaaggcttatatgaagatgcttctactatgataaataaatacaaccaagaaatacctgagttaaaaagtagattgaatactctagatacaattacattacctaacattaataataccttattagagaaatcaagtaagacctatgttaataacagttctcaaagtgttagtagtaattatctaggttcattactgcaattagatagtaaccttactatttatccatacacacctacacgtattacatggaataagatagtttttaataattctgagtttgtaaataagactaaggatgcttttgttattccgttaggtgtatctaaagttaaagtttctattaatcttaaatgggatatattacaagataaagtaaaaactattacagtcaagaagaatagtgatacatacaaaactataactaatggtaatacacacgataatataattacaaatgttatacctgttaaacaaggagatacattcacagtagaagtacaacaagataatgatattaaccttacattactacaagataatacaatgtttagtatagaagtattagaaactactttagcacctactaacactgagttattaggtatagtatccgaacaaacagataagcaactacaaacacttgtaaattctaatgttgatttattgagtttgacaacacaagttactaaagacaatcagttagtctgtcttaatgattctaaattagatactataacaacaggtaaaggtaatgtgtctgattacactctacaacaaataaagtcattttcagctaagaatggtgagagtattttatctttagaagatgtattagctaaatataaaaattctattagatatagtattaatttaccaactactgcaaacatagtagaactactgaaaaaatataatttaattggtataagagcacctaggaatcaagtgtatttgaaagttaaagatttaacaatcacacaagaagtattaaataatttttctaacttaccagtattatataatacttcctatctaacaagtacagatattaacaaaggtatatatacaaatatatacggagtactactaccatatactagcatcactcaagatacagtaaatacagcacataataataacctatctatatatgctagtggtgatatgacaagtgatattataaataagcttattttatatggtatagatggtgtagaaacaaataaaatattagagtttaaaaaagtttaaaagtcctattaatagggcttttttatatatgtcatgttatattaaacttgagaaagtagttgtatttaaatactatatatgatataatacgatatagaaaggtggtaagttatgcctcaatcagatggaaagaatacaataagacgtattgcattacgttttccaacagcaagcggtaaatataatatgtaccgtttcaaagtaaaccctgaaagttatgaaatagatgcaccacaaagaacatctataactaaaactaaatcagacattattgttgaagactatggtaaagatatagagacaataactttttctggtactactggatttagacctgtaaaagaagtagatggtactaaaacaggaaaacaaaaaatagaggaactacaagaacaagtagaagcatacgctaagcagggtggagatggtagcgtagcaggagcttatatagagttctataactttactgatgataaatattacaaagtacatctagcaccgcaaggtttaaaaataacaaggtctaaagatgaatccttgttatatagatatgaaataactttagttgtgataggtaaccttgctgaagcagatagaggttccgtaacatctgctgagtttggtaatgtaaaacccaatgctaaacaaagagttgatgagggtgttaatgatttagatagtaacgcacgaaaaacaagaaacaagaataatcaaatagtatcacaatttgaaaataaaagtagtcaaagctcttctaattctagtagtagcggttcacgatatggaacggcaggaacattaagaggaggtagtggcataagaataggtggttctgaaggtaatagagatggtatgagtaatataggtatatataaccctagacagaatactaatggtcttagtagtactgttgatgatatggcacttaaaataggatacggtgatggaggtgtatctaggtaatgaataattatatacctcaaccacaaggactattaaggtttttaaatggattagagttagacatgtcttacacacatatgaacttattagatgaggaagcaccttttgtttctaaattctatacaccacaaatacaactaagtgaacttgcaagaataaaattaaaagagattaagtctactgatatccctactttagaaagaacatttaacaacaatacaatagttaataaagtagaacaaacaagtttaaagttacaatcacctagaatgtatttaattatgcaatctatcgtaatggaagcttacgctattgtaaactgctttgtagaaagtcctgaatacttaaaatatttaacagaaaaagatgtatctatagtaagaagtaatgttaactacgtagctgactatttaagtgattatgaagaatacaatagtattgttctcgatttaagagacttagacttatgttttggctctttggaattacaactaccactaattaagagtgaggtggtataatgagatttagaaagcatgaagtccaatcagaagaaaccttacaagctatatcacaaaggtattatggtgatgttagttactggttagatttaatagaacataacaatctacaatatccttatattgtagatacagatgaagaaaagaaaaagaaccccgagcacttaataactaaaggtgatattattatcatacctttagatgctgagttaacagactcggtttctaaagaaataacatcaagagataaagatgtattagtagaattagctttaggtagagacctaaatatgacggataataacgagtatatagacgctcatggaacagatgatgaaatattagccctatcttcagatggtagaggagaccttgatatagttaaaggcatagataacattaagcaatctttaagagctagactattgacacctaaaggttctttattattacatcctgaatatggttctaacattcataatttatttggtttaaatatacctgaacaagctacgttaattgaagtagatgtattaaagactctaacatcagatagtagagttaaatcagctaacttaaaaggttgggagataaaaggtaatgaatactatgggtcatttaatgtagaaatcaagtccgtagaagaatctatagactttgtattaggtcaagatgattcaggtgtctttgctttatttgactaagaaaggaaatttatatgagaacaagaaagttaacacagatattatctaggttaatggataagacgatacaaggtacaagcaaaataacagactttacacctggttcagctgtacgctctcttttagaagcagtagctttagaaatagaacagtattatatattaacaagagaaaacattaattggggcattcaagaagggattattgaagcttttgattttcaaaaaagaaaagctaagcgtgcttatggtaatgtaaacattcaattttaccaacctttagacatgagaatgtatatacctgcaggtactacattctcatctactaggcaagaataccctcaacaatttgaaacattagtggattactatgctgaagaaggaaccactgaaattacagtagaagtttattgtaaagaagttggtattgtaggtaatatacctgaagatatcattaatacaatagcctcaggctctagtttaattcgtacaattacaaacccgacttcctttaatacaggaacaaaagaagaatctcaagaggattttaaacgtaggttccatatgtttgtagaatcgagaggaagagctactaataaatctattagatatggtacattacaagtacctgatgttgatggtgtttatgtttatgaagaagtaggtcatgttactgtatatgcgcatgataaaaacggaaatttatctgctactctaaaaaatgacataataacggcattagaagattacagacctagtggtataaaattagatgttgtaggtgtagagaaagaggaaatagatgtgtctgcagtagtaacaatatctaataaagctaggataggtgacacattacaaagacatattgaaagtgttatcagagggtatctaaatagtctgactacttctgatgatttaattattaacgatttaattcaagctattatgaatatagatgataatttaatttatgatgtagcatttaagaatttatctacaaatatagaagtatcttcgaaaggtattattagagcaggggatattaaggtagaattaatatagggggtaaacaatggctaattttttaagaaatttacaccctttattaagaagaaataagaataataaagataaccaagaccctaactatgctttaataacagcacttaatgatgagatgaacaacatagagtcagacaccattaaaagcaaacttcaatcatcattaaaaactgccacaggagattacttagataagtttggggattggtttggtgtatacagaagaataaatgagaatgatgacagctatagaaaaagaattataaaatacttattattaaaaagaggaactaacaacgctattattagtgctattaaagattacttagataatgagaatataaatgttagtgtatatgaaccttttaaaaatatattctataccaataaatcaaaattaaatggtgaagattatttaatgggttattattatagatttgctgtgataaatgtttctgttgatggttactttcctttagagattatagatgtaataaatgaatttaaacccgcaggtgttaagttatatttaacttatgatggtgctactaccataaagggtgatggtgttgttaaatggcttaaaaatctacctaaaattgaaacatatacggatttagatagattattaggttatgatgaaactttctatgggcatttaaacatgagtgaagcaacagctgaacaatctgataaaacaaggttcagaacaaataagagtatattaaatagtgaagatattctatcaggctcttctaatattggacgtagatttataaattatgcttatgttacgacatatgcatatgaacctactagtacatcagccgtcacacatatagcttctttaaatgataaaggaaaagaagcacctttagattattacttatacacatccttaaagaatactaatgatataaatatatcaatggaaactgcttatggtgtatcttatttatacaataactttaatgtaagtgagtttatcagtagatacaaacctaatatagatataactagagataatgctaaaaaacaaatatccgattttataggagaactaacaattgatttctttgcaaaagctttagtttcacctgatgaatcattacctattaagttacaaatatttgattttcgtactaatgaatggttaactgtatcagaaacagaactatctttttacgagaaaaacataggtgtaaacataggttatataagagattacttaaatgatgaccttaatttatttacaagattagaggttaatataggtaaagatgagcaaaaagatataagtattaactacatggatttacatttttataattataaaaaagatgtgtatactatcaaaccttttaaggcactagttgaaaactacatagatttgactaaagatacttatattgaaggctttaaagtagcctcattattaaatggagacataattaataaaaatggatatcaacccataaaatatttaaggttacatgctacttatgattcaactaaacctattgtaagtattacaggtaaaaacagcaataatgaggtacaaaataatacacctatagatttatataaaaatacaactaatagaaacttattgcaatcatataaaggtgatagtaatatattcaagggtgttgtaagcacaaaagagttttatatctcatcatgggctgacaccttatataactcaacgtatttatctaaagtactagaaccacaaaaagtatatactttgtcattcgagatggaaatcacagatgctaatatggacttaaaaacatattctgacaatcatggtatatatttatatagtagtactaaaggtattgttgctaatggtgttaaaagcatgcaaagaaagataggtaataagattgatgtatctaccacatttacagcacctacaattacagaccatagacttgttgtttacacaggtagatatacagcagatggtactgcctctaaaacacctattgcttctaatacggtaaaagtaacaaaccttcaactaaaagaaggagctactaggaaggactacacggtagcatctgaagatgtaactaatgttatagacaaagctattgtgtttgataacatattaacagatatacaaacaataggaataaatacaacaacacctcttaaaaatattgagctaagttattcttattatggggataattggacaaacctaaaaacaataagtaatttaagtcaaggtgaaacaataacacctaataacctagtagatttatatggcttagaaacaatagattattcaagtattacacctttctctagggttatacttaaaactatatggaatgctaacctgaataatttaacaaataaaaaaggtagtatttctaacatgagtaataactatttcaatgctgtatggcaagaggtagatatgatatataacactacattaagtagcatgagcatacttactgatagtgaaggtaatgtatttgatagttcaacaggacaggtaataaaattagcacctaagatataccaaggatatactgatgtagatagattgctaacgtctactactctatataatgagaatattacattaggttcaaatagatttatttatgacttacgggatatgttactatcaagtgatacattcacagtagataataaaattaaagtaatagatacatacacagaagtacagtaaagatattgacaataaagtattaatatgatatagtaaggtatgcgtattatagtataccttgttatattaatacagaatactagacatgaaaggaataaaaaatatggctatagcaacaaatgcttcacatgtagaattagctaaatacattgtaagtaaggctgattctatttatttaacaattggtaaaagtacagcgtggtctaatgaaacaagtccacctcaacctgaagaaacagcaacatcattacaagaagttatcggatataaaaaagcaactaaggtagcattagttagacctgcaaaaacaacgggtgatgaaagtaaaaaagaaattacatatggtaataaacgatgggtagaaattgactcagctaatgcagttgctgaaggtgctaagtgggtgtacttagaaagtagtattgttggagatgagttacccttaggtacgtatagacaagtaggatttgttatggatttgttagctaaagatagtatttctaaatttaacttattacctagtgaagtgcaatctacaggaactttattattttatgataataaacaattccaaaatagaagtgaacaaacaactgtaaaagagcgctttatcattgaagtttaaaaaggagaattgaatatatatggcaattaattttaaaagttctccatacttagatagatttgaccctacaaaagatagaacaagagtactatttaatccagatagaccactacaacaatcagaactaaatgaaatgcagtctattgaacaatattacttaaaaaatttaggggattctatttttaaagatggggataaacaatcaggattaggttttacattaactaaagataatgtactacaagttaacccaggttatgtgtatataaatggtaagatacgttactatagtagtgaagacactgttaaaattacgggtgtaggtaaagaaacagtaggtattaaactaacagaaagaattattacacctgatgaagataatagcttattagaccaaacaagcggagttcctagttatttttctaagggtgcagaccgtttagaagagaagttatctttaacagtcaatgaccctacttctgctactatttatacttttatggatggagacctctatatccaatctactaatgctgagatggataaaatcaacaaagtattagcagagcgtacttatgatgagtcgggttcatataaagttagtggatttgagctattttcagaaggaaacgccgaagatgataatcatgtatctgttgttgtagatgctggtaaggcatatgtaaaaggttataaagtagataaaccagtttctaccagaattagtgtagagaagtcaagggaattaggtaaagcagagaatgaaagtactgtatttaataaatcatcaaataatattactttagctaatacccctgtaaaagatgttcaacgtgtaacagcgcaagtattagtagataaagagcgtgttacaagaagttcaacaggagattctcaagactatttatctaataaaacagcttttgaagtagttagagtatggacagaaacaagtccaggtcagacaacaaaagaatacaaacaaggagaagactatagacttactgatggtcaaacaatagactggtctccttcaggtcaagaacctaatggaggtacatcttattatgtttcgtataagtacaacagaaagatggaagtaggtaaagattatgaagtatctacagtaggtgagggagtaggtaaacgttggtctattaatttcacacctgttaatggtactaagcctattgaccaaagtgttgtacttgtagactatacttactacttagctcgtaaagatgctgtttttattaataagtttggtgacattgctattcttaaaggtgaacctaatattatgagattagtaacaccacctttaaatacagaccctgagaacttacaattaggtactgtaacagtattacctgattctaacgaagcagtatgtatttcatatgctattactagattatctatggaagacttacaaaaagtaaaaactagagtagataatttagagtataatcaagctgttaatgctttggatgatggtgcaatggaaaaacaaaacccattaacattacgttctgtatttagtgaaggttttatatctttagataaagccgacattacacatcctgactttggtattgtatttagttttgatgatgcagaggctactctagcgtataaagaagctgtgaaccaacctaagattattcaaggagacactacagctcatgtatggggtcgactaatttccgcaccatttacagaagagcgtacaatttatcaaggacaagcatccgaaactttaaatgtaaacccttataatataccaaataaacaaggtgtgttaaaattaactcctagtgaagataactggatagacactcagaatgtaacaatcacagaacagaaaactaaaaaagtaacaatgaaaagattctggagacataatgaaagttattatggagaaacagaacattacttatattctaacttacagttagataaaggacaagagtggaaaggtaagtcatacgcatatgatagagaacatggtagaacaggtactctattagaggctggaggacagcgtacacttgaagaaatgattgaatttattcgtgttcgtgacgtatctttcgaagttaatggtttaaatcctaatgataataatttgtatattttatttgatggtgttcgttgtgctattacaccagcaacaggctatagaaaaggttctgaagatggtacaattatgtctgatgctaaaggcacagctaaaggtaaatttacaattccagcaggtattcgttgtggtaatagagaagtaacattgaaaaatgctaactctacaagtgctacaacatatacagctcaaggacgtaagaagactgtacaagatgttattatcaaaacacgtgttacagtaaacttagtagacccattagcacaatcattccaatatgatgaaagtagaactattagttctttaggtttatactttgctagtaaaggagataagtctagtaatgtaactgtacaaattcgtggtatgggagatacaggttaccctaacaagacggtatatgctgaaacagtaatcaactcagatgatattaaagtatctaataatgctagtgctgaaactagagtatactttgatgaccctatgatggctgaagcaggtaaagagtatgctattgtcattattacagaaaatagtgattatactatgtgggtcggaacaagaacaaaacctaagattgataaacctagtgaagttattagtggtaatccatatgtacaaggcgttctatttagttcatctaacgctagtacttggactccacaccaaaattcagatttaaaatttggtgtatatacttctaagtttaatgaaacagctacaattgaatttgaacctattaagaatgtatcagcagatagattagttttaatgtctacgtacttaactcctgaaagaacaggttgtacttgggaaattaaaatgattttagatgacatggctacatctactacatttgaccaattaaaatgggaacctattggtaactaccaagatttagaggtattaggtttagctaaacaagttaaattaaaagctacatttgagtctaataaatatatttcacctttattaagttctaatgacttaacgtttactacattcttaactgagttaaaaggttcctatatcggtagagctattgatatgacagaagctccatataacacaataagatttagttatgaagcattcttacctaagggcactaatgttattcctaaatattcagacgatgatggtaaaacttggaaaacatttactaattctgctcaagtagttaaggctaatagagactttaatagatacgttattgatgagaaagtaaaccaatctactaagaataacaaattacaagtaagattagacttatcaactgaaaatagtttcttaagacctcgtgtacgtagacttatggttacaacaagagatgagtaagtttaaagagggtttcataccctctttttatttaactaaggaagtgatattatgcctacagaatatagagacccttactcacaagctaaactctttattcctactgtagaagaaaaagctataaaagaaatggaacaaacatataaagataaactacaagaagttaatgagcttattgatgagcttaaaaaattgaaaggtgattacacacatgacgtttaactacacacctctaacagaatcacaaagattaaaggatatgtaccctaaagtaaatgaaatgggtaaatacttaaaagaagaagttaacttatctgatttaaaaactattagttatcctgacttaaataatgttctaaatttcatacaagactcaggtgactattttgtaacacaagccagaaacaccccacaaggtgtaagtaatacagggtttttacacttagataaaaagggtagtacttattataagttatattatgccccatctaacacaaataaattgtttgtgaaaacttattataatggtactgtctatgattgggttagttttaaactagatgaaggtacactatacgattcaggaaatacaattaatgtaaaagatttaacagagtccacaactcaatttgcaacactcataaatccccctaaaagtactttaaatacaggatggataaattataaggaaagtaaaaatggtacctcagctttagctgagtttaatcctattaattctacttcaacatttaaaatgattagaaagttaccacgccaagaccaacaacctaacttactaagggatagtttattcacattaccaatgacggatgtagctaatataagaacggattatatagataatacatctttttggggttttactaataatgcatctacctcaacagttagatatatgggtgaaaatactattcaattagatgatggaggggaatcatatcctactgttatatctaaacgttttagattagggaataatttatatgtaggtgatacagttacaatgtctgtataccttaaagtaaatgacactagtttattaaatggtaacttcccttactttgaaatagcgggttatgataatgtatctcaaaaaaataacccttacacgggaggaagaagagaagttaattactatgagttatctacagaatggaaaaagttctcatttacctttacattacagtattataaccaagagtctagcaatgacactgttaattatatatcagcattattaagatttaactgttctaactctaaaaataatggtgctattgtatattatgcactaccaaaattagaaaaatcgtactcggtaactccatttattacaaatacttatgataaaagaaaatatgatgagatatggagcaattggatagagacaacaagcaaggatgaacttcaaacacacagtgctgtagatacgtacaacaatgactactacaaatatgtatggaattatcaaaacgcaaacggtagaagtttacaacaattagcaatgtctgtacctcaaggtttttatactttttattgtgatagttctataagtggaacacctaacaataaaactatacaaggtacgatacaagtagcatacaagaataataatataaacactataaataaaataatacaaatggattttagtgaccctaaaggtaaaagatattctttaacatataataaagatactaatggttggcaagatatgaaagttcaaatgtctagtaatagtctttgggaaggtactcttgacctagcttcaggtaatacagtaaacttatccgattcattagataattatgattttattgaagtagtatactggactagaagttctggacataatacaactaaaaggtacccagcaagtacatctagtattgtaattagagattttaacttagtaaatgatggttctaatgctagtgtagacttttttgaagggtattgtgacattacagatagagtgaatgttactgctaaaatgtcaaaaacaaatacaatagatgggaatagaaatactatgtctgttgctcagtttaataaaactggtcatattgaagtattaagagttgtaggactaacgtatatttaataaggagttttgtaaatgataaaatatgatattagtaaagatgaaattgtgttacatttagaagatagtaagtatatcatgggttacactattgttggggggtatgatgagaacaacggtgacgtaaaaatttctaggtcaattcttcctgacgggttttttactgagtttgttagtactaagtatgtatactataagaatactaacgaagtaatatataacaaaaattttaaggataatgctaagagtattgaagatgctgattaccaaccacctaaagagtatgttcctaaagaagattataaaaagctagaaagtgaagtagaagaattaaaaagaatgctacaagaattgttatctaagaaaggataaataatatggcactaaattttacacctattacagaaaatagtacaatagcagatttaacaaaacaagttaataatataggtggtgtactaactgaggacagaaatgtctttgaagtaacaacagacttacaagcagatgtaagtagaacacagaaagttaagttaacaacagatagagggttagctaaagatattgattatactaattacttaagagatattagaaaggtaggtctatattatataggagctcgtacattagctactatgtatgataaacctgatatggaaaacatggatgtactacttcaagtactaaccttagatactgaggatagagtagtacagatattacatacattatctaccgctgattctaaagtaaaagtactatataggtttgttaacaattatcaaacatcacaatggcaagtagtacaaagtctaccaaataataaatacacatctcaaataggtggaagtccttttgatattaacacacaaggtatatattatgtgtctagtatgtcggatatgccaaatggtgtatatgaagggtttttacaggttattatagacaagaatgaaaatagaatgttaagattaacggatattagcacaggaaaagaatatcttaatgttaaaaaatcgtacggtagctggggcacatggaaaactgatttagatgtacaaaaaataagtaagtatttattatctaatgtagatggtgatgctgaaagtaataactactctttatctgtatatactacagacaacataacatttcaacaggcaatagctaaacatattgaagaaacaagtaaaactgtttttactttttatatacaggggggtgttgtagggtctccgtcctcagttagttgtagaggtgtattcatatcagattcaactaactttactaacctatatggtgtttatactgctataggtactgatggaagaactattaatggttctgtaaatggtaatacatggaacacaacaaaaacactaccaggatttaaagagctgtggaatggtgcacataactttaaagatacaaataaaaaagaaaccatgtctgattctatatctaactaccagtatgtagaagtatacacaagatatagagctctacaaaatacaaaaggtactgataaaacaggtacactatgtcataagttctatatagatggagacggtatttacacatgttcaggagcttatgtatcaggagactctaatattggagtagagtactatcgagtaactttatctattactggtgatacttggacaattaaagatagtacagtaaataataataaagaccaatatgttacacgtgttgtaggtatctctttatcgtagactaggataattcctagtctttttttcttgactaactttaataaatatggtaagataataaaggactaaaaagaaaggagaatatatgcagttaagacaacagaatatatatacatatgtagattttgatgaaagtgatgggtatattaaagatatcatacttaagcgtgttcataaaacgttaggagctaagaaagatggctatcaacatagcttagcttttaaacgaggtgtgtgggatggttatgtagatttctatgattatgctgagaacaaattccctagtggattgttacctaagatgataacattactaggtgagttacaatcaagacataactttcaatatgaaattattgatgaaaaatctgaaagctttttatctgaagaagatattgatgatgaaatacaactactagataataatgtaggtaaaattacattacgtgattatcaatatgaagctgtgtttaatagccttgtcaattacaatggtatatgcaagcaagctaccaatgcaggtaaattttgccccttatagtagaaatattataagtgtaactcctttaattcatgggaactctctcatttgagacaatcatgagccaagcctagtaaattactaagaaggtgcaacgactattatgtacaatcaagtggttggaaacagggagaacctaagtctcattagatatggttaagatatagtctgaactttgtaggagactacaagaaggttaggagtaacgaacctaatcgtaacaaaattgaaaacagaggttgctagcggtatcatagaccaactattaccacaactagaaaaaggagagcgtgtagctttctttacaagctctaccgagatttttaatcaatctgctgaccgtttaagtgaacgattgaatataccagtaggtaaagtaggttctggtaagtttgatgttaaacaagtaactgtagttatgattcctactgttaactctaacttaaaagaccctacagaaggagtaaaagtatctgctaaagtaaatttaagtaaaaagatagctaaagagatacttcctaaatttgaaggtggtaaaaatcaaaaaaggttacttaagttattattagaaagtacgacacctaaaactaaagtagagcagaatgtgcttgatatacttcaagatatttatcataattcaaagacggatgctgaagtattaatggcattaaacaatcataatgttattttccaaaaagaagtaagaaagaaaaatcaaaagagttatgataagtatcataaaatgcgtgaatttctagactctatagctgtaatgatagttgatgaagcccaccacagtaaatcagactcatggtatacaagtttaatgtcctgtgagaatgcattatacaggatagcattaacaggctccatagacatgaaagatgagctactatggatgcgtatgcaagcattattcggagatattattgtaagaacatctaatgagtttttaatcgagaatggctattcagctagacctacaataaatattattcctattgctaaccctgatgatatagataatattaaggattacagggatgcatataataaaggtattgtacataacgagtttagaaataaacttattgcaaaactaacagctaaatggtttaatcaagataaagctacacttattattattaactttgttgaacatggtgagatactatccactatgttgaatgaaacgggtgtagagaatttctttttacatggtgaaatagagtcagatatgcgtaaacaaaagttagatgaaatgcgtaatggtaaacttaaagttatgattgctacaagccttattgatgagggtgttgatattagcggtattcgttcattaatcctaggtgcaggtggtaaatctttacgacaaacactacaacgtgtaggtcgtgcgttacgtaaaaagaaagaagataatacaacacagatatttgattttaatgatatgacacataagtttttatataaacattctaatgagcgtagaaaaatatatgaagaagaaaaatttgaaattaaagaattaggaaagtaggtatgggtagtgactaagacagaaagaagattatatgattacattgaaaaaaaatcaaaaaataatacttatcaaatagctactaaaaaagagttagcagaagagctagatgtctcagtctctactttatctaaaaaccttaaaagattagagcaggataacaaaattaatgttgtttctaaaagaggaaataaaggtggtattgttatatcactagtaagagactatgatacagatagtctcttacattttaatgatacagatgacaatgttattacttctaatctagaatacgctactgaattacgaaatagattttttcctagctacgtatatgaaagaaaagaaaataaacgtagaacaaaactagaaatggttcaatataatgctagtaaagataaaaacaggaaaataatatcagatatgaatttttataatagtagtttaccttaccctactaaagatatttttaatatgtcttatgaccccgagggtttttataaagcttatatcttatgtaagttatatgaccaatatgctatagcacacatgaatgctaaatatatacaacatttaacattatcaaatggtaatgaagacgtagatagacataagcatttatctgagtactacagaaagaaaatgttacagaatttatcacgagatagtatttgtaaagacttctttggtagtaagacatttaatacattctacaacttttacttaaagataaaagataagaacattaatgtttttaaatatatgcaaaatgtttttaagaataccacatttgggtttgagaataaaacacaaccttatcctatacctgcacctaacttttttagttcagataaatatctaactaattatgaaaattatgtaaaaggtattaaacgaggtgtaaataaaacaaatagacaaattggggaagtagagtctttaattaagtcatctgattacctattaaatcctgctgtagcacaattacatcaattatatacaacacctttaaatgaagagatacatgatattgatacaatgtttaaaacagctttagatatagaagatactatttatggtatatttaatggcatgaaacatattatacttttatcatataataaatatatagaacatctaatagaaaaattacctagtaaacataaaaacttattaaataaatttattaaacaatgtattgtaaatgagtattcacctactacaatacctaacaatgctagactatctatgtttttaatgcaaaaagagtataaagcaaatatcgcagaattaaatggtggtatagatagaagagacttaataggtataagtttagtaaacactacagacttaagtaaacaagatattgtaaatatagaacaaacaacaatgaattatctacatatgagaagatttacttcaacatcatatattttacaaatgtatagtaattacttaggttatgaggttaatttaaaagaagttaagtctataattgaaaaatataatttaattgataaaataccattgacaaaagaaggtatgttgaactataataaggttattgatatagtaaaggatgacacatatgagtaaacgaattaaggagattatcctacataagtctatgaaggatatacattttgcaagagaagtactagataagttacctaaaagtctatttgctacagaatcggaagacatgggttacttattcacagctataaaaagaacagcacacattgctgataaaatgtcaaatgaatctttagctattaaagtagaacaattaatgggtagtgataaacaagatgatgaaaaagtaacacaaacattaaaatatttagatagcttatatacagtagacatgaataataaagacgattctgtaaactatgaagtagaaaagtatattaaaacagaaatgtctaaagaagtattagttaagttcatagctgagaataagcaagaggactcagataacttacctgaactagtagagaaactaaaacaaatagaagtcagtgacattaatggtactgacggagaatttattgacttctttgaagacgtagataaaaagagagaactattaagcaacttaagtattaataagtactctacaggtttccattctatagaccagcaaattgaaggtggtataggtagaggggaagtaggattagttatcgcacctacaggtagaggtaagtctcttatggcaagtaatttaggtaagaactatgttaaacaaggtttaaatgttttatatattgccctagaggaaaagatggatagaatggtattaagagcggaacaacaaatggtaggtgtacaaaagaatcaattacttaatggtgacttatctttaaacacagatgcttataataagatacaagaacattataaaaagaatagacaactgctaggtaacttttatatcgttaaacatatgcctggtgaggtaacaccaaaccaattagaacaaattataattaatacaacaattaagaaagataagcatatagatgttgttattattgattatcctaaacttatgcgtaacccttaccttaagtatcaaagtgaatcagatgctggtggtcgtatctttgaagatattcgaaaattatcacaagaatacaattttgtttgttggacattagcacaaacaaacagaacagcttatggttcagaaattattacaagtgaacatgttgagggaagtagaaagattgtcaatgctgtagaggttgcttttgccgttaaccaaaaagatgaagaatttaaaaatggttttttaagattgtacttagacaaagtaagaaacagttcaaacacaggtgagagatttgttaatcttaaagtagagccgactaaaatggttgttagagatgaaacaccagaagaggcagaagaacataagcaaatactagcggaacttaatggtgaagataaaagtagatttaaagaaaaacctaataaagctgaagctattaataattcttttggagggctgagtttttaatggatgactttactaagctttataaaaaagtacgtagaacatttacacgtaataaagcagaatgggattatacaaatacaggattaagaaccttccaattaaaaggaactaatgtatgtgttacattactagactctatagcaaggaataatacaacaggatataagtacaacgttatgtctaataaagtacctgctataccttgcaatacacatcaagaagtaattaaagcaattgaatataagttaaaaaattgagaaaaagccttgacaatgtatttgttaaggcttatacttttattataaacaataaagaggtggtaagatttgaacttaaatgaagcaaaagtaaaattaaaaaactttaaagtcattaataagcacggatttatagagactataaacacaaagtactctgaaaaggagttagaggacgtctcaaccgatatatttaatacattggataattacgtaatagataagtatggttgtaaattgtttaatattaagcctaaaagaagtattatagagttagaattaacaaacaataaaattaaacacttaagaaagtaggatattaatatggaattagaattaaataaaatatataacgaagattgtttagaaggtatgaagaaaatacctgacaatagtatagacttaatagtaaccgaccctccttatttaattaattataaaaccaactggagaaaaaataaagagcatagatttggaaaagttattttaaatgataataacgaacaacttattataaattatattgaggagtgttacaggatattaaaaaacaatagcgctatgtatatgttctgctcatcagagaaagtagatttttttaaacaacaattagagaagaaatttaaaataaaaaatatgattatataggtaaaaaacaatcatacagcaggagatttaaaaggttcttttggtagaaaatacgaaatcttatttttagtagtaaagggcaaaaaacattttaatgggagaagattaactgatgtaggggaatttgatagggtaagtggtaaaaaacaattacaccaaaatgaaaaaccattagatttaataaaacaatgtattatgaagcatagtaataaaggagatgtggttttagatgggtttattggtagtggcactactgctattgcttgtatgagtactaaccgcaattacattggttttgaattagacgaagaatactataatttagccagtgaaagaatagaaaaacataaggagatactaaacaatgaaaatgacaatacaggaactacaagataagactgaacttttaagacacgtaaaggtagatacggaagaagcaatggatatccttgaagatatattaagaggagagccttacacagatgaggtatgtgaattgatacatttttattcaagtaagctactaaatgagattaatgacaatcatatgtttaaattacaggagtttgctaatcatgatgttatagaaattagtgaagagggagtaaaataatgataaaattattacagggggattgcttagagttattagatacaattgaaaatagcagtatcgatgctattgtaacagaccctccatataacattgcaaaagaaaacagatttacaactatgggtagagctggtattgattttggagagtgggataaaaattttgaatctactttatggattaataaagctacaccaaaagttaaaaaaggtggtaatatcgttgtgttttgtgacatgagacaatttacacctattattgatactatggaagcattaggctgtgaatttaaagatgttatacgtatggaaaaatctaatcctatgcctcgtaatagagacagacgattcatttttgatactgaatttgctctttattttgttaaaaaaggagctaaatggacttttaaccgtttagatgaaaaatatgaaagaccttgtattaaaacaagtgtgacgcctaaaagtgaaaaaataggtaaaggacatccaacacagaaacctttatatgctatggaatggttgttagagcgcttaactaatgaaggagacattgttctagactgcttcatgggaagcggaacaacaggtgtcgcatgtaaaaagttaaataggaattttattggttgtgaattatcagaagaatacttcagtatggcacaagatagattactaaataatacaaattaaaacaaaacccttgacaacatgtttgttaagggttatacttttatcataacgtactaaaggaggacactaatgaaatttatattttttacagatagccattttcatatgtttacgaattatagtaaacctgatgaagattatggtaatgatagatttaaagaacaaattgagacattacaaaaagtatttgatttagctagagaaaataaagctaaagttatatttgggggagatttattccataagagaaatgcggtagatactagggtatataataaggtatttgaaacctttgctaagaatcaagatgttaaagtatatatggttagaggaaatcatgatgctgtgtctaattctttatatacggaatctagtattgatatctttgaaacattacctaatgtggaagtaactaaagatttacgtagtgactcactttctagtaaagtacaattaactatgtgtgcttatggagatgaaacagaagaaattaaggagtatattaaaaaatcttaccaaaaagataaagtaaatatactagtagcacatttaggtgtagagaatagtttaacaggtaaaggctctcatagattagaaggtgcatttggttaccaagacttattaacagaacaatatgattttattcttcttggacattaccatagacgccaatatctaaacaataatcctaaccatatgtatggtggttctctaatgcaacaatccttttcagatgaacaagaagctaatggtgtacacttaatagatacagataagttaacatcaacgttcatttcattagatactagaaagtttattacagtacaaggtgacaatgtaccatataacatgaatgatttagtaaaccaaggtcactttattaggtttattggtactccagaacaagctaaagtaattgaattagataaaacagaagatgaatctaatgtacaagtacaaatgaagaaagaatacacggtagaaaagagagtcgacgctgacgtgtctgacagccctataacgattacttctagttatgcggatagatactacccagaagcaaaaaatgagcttctagagtgtttaaaggaggtactatagtatgatagatatcattataaagaatattaaaccaagtatagataaatctaaacctattttacagttcttacaaaataaaagaacatatgatgtatgtaatgttaaaaatattgatgatgcgatgtaccttattaacaaagtactagaggaagctaactacgctcattattatacgagggttattgaacaagaagattgttatattctagattatggttcacatcaatgtttctttaaattgttaaaagaaggtggtacaaatggttaagtttaattatgtagagatgaataactttttagctattgagcatatcaagctaaatctggataagcaaggtcttgtacttattgagggtattaataaaacaaatgatagttttgaaagtaatggaacaagtaaaacgagcatgatatcttctattacctatgcactgtttggaaaaactgagaaaggtttaaaggcagatgatgtcgttaataagtataagaagaaagacacctacgttaagctttctttcaacataggtaaagacgagtatttaatcgaaagataccgtaaacataaagaacacaagaacaaggttaagctgttctgtaataacaaagagataacaggctctacaaatgatgttacggatacccaaatacaagagttatttggtattccttttaacacgtatgtgaatgctatcatatatggtcaaggagatataccgatgttttcacaagctactgataaaggtaaaaaagaaatactagagtctattactaagactgacatttataaacaagctcaagaagtagctaaagaaaaagttaaagaagtagaggagaaacaaagtaaagaacaacaagaaatagaaaaactagaatataaaagaaacctaaaacaagaacaatataataatgaagtaaataaatataataacttattagagcgtaagaagcaagaagaggaacagtttaatcaaaagaaacaagagtacgagaataaattaaaagatttagacaatcagattggtgtatgtaaaggtagtattcctaaagttgaagactttgaatttgtatttagtgaaaattatacaaaagctaaccaaggtattgaaaagattaacacaagtattaatgataaattattgccattattgagtcaagaaacaacaaataagaatacaactctaagtataattaatcaattaaaacaatctattaataaactagatacaaatgaccattgtcctgtttgtggttctcctatagataatacacacaaaataaaagaaaaagaaaacttagaattacaaattaaagaaaaacaagctaaaatatctcagtacgaacataatgagcagactataattaataagaaagaagagctactagctaaatctaaagaattacaacaatttatacagcaagaagatatagaaaagaaaaaacatgatgatgatattcaacggcaatacagagaacagcaagaagtatatgatgaaattagccaattagaaaacactaaagctaatttaaaagaaccaatattaaatgattactcttatatagaagaacctaatgaagaattacacaataaagaactaaaagatattgacaatactattgacaaacataaggaaaatatagtacaattagagagtaagaaaacaaaatataaacaagctgtagatgcatttagtaataaaggattacgttctgtaatattagactttattacaccattcttaaatgagaaagctaatgagtatttacaaatattagcgggttcggatatcgaaattgaatttcaaacacaagtagaaaatgctaagggagaacttaaagataagttcgatgttattgttaagaataacaatgggggagagtcttacaaatctaattcagcaggagagcaaaaacgtattgacctagctattagttttgctatccaagacttaattatgagtaaagaagatatatctacaaatatagccctttacgatgaatgctttgatggtctagacactattggttgtgagaacgtagttaaactactaaaagatagactaaaaacagtaggtactatttttattattactcataataagagtctagcacctttatttgagaatacaattacggtagtaaaagaaaacggtgtagctacactaagaaaggaattaaataatgaaactaaagattaaagataaccagtttgcatctttaacagtaaattatacaaacaatgcaaagttacatatagataatattcctgtttctactttagtagactggtaccctttaagtaatgcatacgagtataaagctagtaatgactttggatatattgaactaaagagattacgctctagcttacctgtgtcttatgggttaactcaccaaaccttatataaatgtgaaactgttaaatgtaaattaggattatggtataacgaaaaaataaaagaagataatgagaaaattattgagaaagctaagttgtacggtttacctactatagatgaacccttcacaagtaaagatgtaaagcaaggatttagtgacttaggtgttattttccaaacactaaaaacaatcagtacaaacgagtacttgaaagataaaacaattgaagagattaacacctttagtaagaaatcagaggattatcaattaaatgaagtactcaagtacagtacaacattggtagatgatacttatagtgatttaagtcaaatctataatatgttactattaatgaagaaaattgtttctatataggaagtgactgaaaatgaggtttgaagactttttaagtcaagagattggaacacccaaagagaatactgtaggagaattacgatattgttgtcctttttgtggggaacagaaatacaagttttatgttaagcagtctttagactctactaatggtatgtatcattgtaagaagtgtggagaacatggtaaccctattacttttatgaaatcttattatagtattacaggtagacaagcttttgagttattagaaacaaagaatattgatatacaattctcaccaacattagaaatatataacacagatttaactgaaagtgagaaattattactaaggcttaatggatatacaaaagataatagtagtataaaatcaaaagcacctgaactacctatagggtttaagttgattaaagataacttaaataataaagaagtagtaccgtatttaagatatctcaagaatagaggtattacactacagcaaatcctagactatagtatagggtatattataaatggttattgctattcttatggtattaataatgagaaaaagaaaatagtacttagaaatagtgttatattttttacttatgacaatgaaggtaagtatatatactggaatacaagaagtattgaaacaaatccatatattaaatctataaatgcaccttctaaacctaatgagtatggtaaaagcgatgttatatttaatttaaatatagctagtaaacaaaagtttgttgttataactgagggtgtttttgacgcccttacatttgataagtacggtatagctacgtttggtaaacaagtttcaaagatacaagttaataacctcatttcaagtattcctaaagaaacacctatatatattatgttagacacagacgctacagactttagtattaatttagctaataagcttatctcacatttcaatgtagtgtatttagtaccacatggtaatgaagatgctaatgatatgggtatggaaaaagcttttagtactttgaaacacaatagatttttagttacacctgaaagtattcaaagttacaagttacaacaaaagttaaaactttaatcttgcattataatgtatagtatgttacaatacatatataaaaataaaggaagtgttattttggaagagaaagatattctacattttgtagatgagtatgttacagcattacgtgtaggtaatgaacagcgtatgcaccaattagaagagttaggtaaagaacaaacagcaactttaacagatgttatgaaagctattactaacttattgttaggtgttaataaacaaatggttgacctagagcaaaatacagagttaaacttaaacattctaattgatgctttatacaaagctgagttagttaacgatgacgtattaaaatatattgaggaagcaattgaagaatcaaaagaaaaggatgaagaataatggaaaaaaatattagtacacatacaaaaggtatttcacaagaagatatggacatgtggttagaagctattacacaaggaacagtagaaggcaaggaattaactgaggacactgctaaacaattacatcgtattggagcacgtagtgtatcattagatgaggctactagaattgcacgagcaattaatgccgttacagttcaagagtatgcatctgcctttaatgatgcttttaatgctattgatttgttaatgattgttatggaagataacctaggtgtaactaatgagcaggtagagaaagctcaacttaaattaaaagaaaaacgtgaaaagtatttagaagaaaaacaagaagaagtaagaaaaaaacaagaagaacataaattaaaagaagataatgaaaaagtagtgcagttgaagaaacatgacaaatagtaaaaaaaaaggtgatgtattcgaaagaaagattgccaaagaactttctgattggtggggttatccttttagtaggtctccacaatcaggaggtgcatcatggggagctaacaataatgctgtcggtgacattgtagcacctttagagtctaattttccattagttgtagagtgtaaacatagagaaaattggattatggataatgttctacttaataataaagaacctcatacatggtgggaacaagttataggagatagtttgcaagttaataaaactccttgtttaatatttacaagaaatagagcacagtcatatgtagcattaccttatatagaagatgtatatgttaagttaagagatgaagaataccctattatgagaacggattttattgtagaaaatgttagaaaagataaacatttttatgatgttcttataactacgatagatggattgactaacttaacaccttcttatattatatcttgctacaacaaaaaagagattaaaccatatagagttgtcaagtctaaaatatctaaagttagtaaaaaagaagataagttgattgatgatttacttgatggtatataaggaagggatactagttgattacacaaataaaaaaacgtgatggttccgttgtagattatgatttaagtaaagttactaatgctattttaagagccaactcagaaacagaagaatatattgaagatgttattgattctcttgtagatgacgtagactctttactagaagaacaagatactatcattactgtagagttaatacaggatatagtggaagaagttttatttagtagtatgtataaagacacagctaaatcttttattttatatagggataaaaagaaaagagagcgtaaaagagacttattcaaaccaagaaaagaattaaagccctatgaataccctgaattgttagaatataaagatgctatacgccaaagttactgggtacacactgagtttaactatacatcagatattcaagactataagaataacgttaaatacaatgagcaaatgaccattaaaaaagctatgctagcaattgcccaagtagaagtagcagtaaagactttctggggtgacctatatcatagaatgcctaaatgggaaactggagctgtgggtgcaacttttagtgagagtgaagcacgtcatgccgacgcttattcacatttattagagattttaggtttgaatgaggagtttaaaacaattgacgatattcctgctcttaaagaacgtgttgatgagttagcgatgcatgtaaaactaagtaagagtgaggatgatagagattacgtactatctgttttattattttctatatttattgaacatgtatctttatttagtcaatttttaattatgatgagttttaataaatataaaaacttatttagaggtttatcaaatgctattgaagctacatctaaagaagagcaaatccatggattatttggaacagaaatcattaatattcttagagaagaaagacctgaatggttcaacaaagaaatggaagatgcagtttacacagcctgtaaaaaatcttatgaatcagaaacacggttacttgattggatgtatgaagatggggaactagagttcttacctaagaaagtagtacaagaatttattaaaaatagacttaataactctctagtagctgttgggtataataaactttttgatgttgatgaagagttactaagtgaagtgtcatggtttgatgatgaagttattagtactaagttaacggactttttatctaaacgttctgtaaactatacaaaatttagtaattctgtaacggaagatactattttttcaacggaatctgattttgaaaatactggtaaacgagttactaaagataaagtaaacgctattttaagactaaaaatgatataaaggcagtgtatatagatgagtaattttgaatggttaaataatgattctagagtttttctagaacgtggttatttaagtgatggtgaaacaccagaacaaagaattaaagatattgcagattatgctgaagatattttagatattgatgggttttctgacaagttttatgattatatgagtaaaggttattattccttatctagtcctatatggtctaatttcgggaaagatagaggatttagtattagttgttttggtagttgggtagatgatactataccatcgatacttaatactgctagtgaagtaggtatgatgagtaaatacggtggtggtacaagtggttacttcggtaacatcagacctagaggctcagaaatcactgataatggtgtaacaagcggttccgttcactttatgaagttatttgagcaaatgacggacacaataagccaaggatgttatgatgataaaactgaaatactcacagagaatgggtatgaattattatctaatgtagttagtagaaaagatggaacaaaaattgcacaggtaacagataatgatgaaatagagtttgtagagcctacagattatatggaatttgtacctgaagataatgaattagttcattttaaagatagtaaaaatattgacttattagtgactaagaaccataatatggtttttaaatacagaaataaaaggactaataaagaaacaggaaaaagagaaagtgttttagtacctgagtatagaaatagattagcagaagatatgccattacatagagacgtttatttagcacattcttcatttgctaaagaaggcagaggactcacatttaaagaacgtcttttggtagccttgcaagcagatggtagtattattaaaaaataccctaaatctttgaagtttagatttagtaaagaacgtaaaaaagatagactattatggatattagatggtctaggagttgaatacacatataatgtagacaaagacaataatcataatatttatgttaatatgggtgaagaattacctaaagaatttagtaaatgggtaaatttacaaaatgtcacacaacaatgggcttatgattttattgatgagttgtctcattgggatgctagtagaagaacggataaatcatttatctacatgagtgtggttgaacataatgtagacattgttcaagccatagcttctatggtaggttataaatctcgtaaatcagttgatttaagggaaagagaacctaataaagccactatgtataaaatatatctatctgaaggtcaattatttggaggctcaaatattactgtggaaacggtacaatataaaggtaaagtatattgtgttgaagtacctactcataaacttgttgtaagaaggaaagggcatacattagtttgtggtaattctacacgcagagggcgttttagcccttatctacctatagaacacaaagatattgacgagtttttagagattggtaccgaaggtaatccaattcaaaacttaacacatgcagtaacagttactgatgattggttattagacatgattaatggggacaaagaaaagagaaaaatatgggctaaagtattaacaagaagaacacaaataggatacccttatatcttctttcatgataatgcaaatagtaatacagtagatgtatataaagacaaagggttaactattaataactcaaatttgtgtaaaaatttgcacctttagtaagtaattactatcgaaaaatccatctaaacggtgaatatctaagttaaaatatacgacaacaccgtgctaaatcagattataaatctgtaaatgcctaacgactatccgtaacctattcacataagtgaagggataaggttagagccaagtggtataagtattgagtaataatcaagtaaatcttatttaaatcgaaatggtggacttccttattaaggaagatgatatagtctgctctatatggaaacatatagaagttcatattaacaataataattaagagggtcgaaaatggagtaccatatttataaaattacaaacaaaaacaataataaaatatacatcggaattacatcaaaaacagttcaacatagatttaaaaatcatattagaaaagctaagataggctcaacaactaatttacaccaatcaatgatgaaacatggtgaagagaatttttatgtagaagaattatacacttttagtacagaggataaaaagtttgcttacatggtagagcaaatttttatagacatgtacgaatctgtaaaaaaaggttataatatggagataggttttgggtggaatataatggatagacgaggaaaaaacaatccgatgtatggtaaagaaagcgctaatgctaaaaaagttattgttgatggcgtagtttataaaaatatgggtatatgctctgaagagctaggaataaacagaaatacattaaccagaagatgtaattctgaaaaattccctaactataaatattgttaattagagaactggtagtgattaacgaccactattgaacatgtaggagtgaaattatgttacctaataaagaagattggtcatttgtatgtgacctatctagtatgaaccttgttaagtatgatgaatggaaacacacggatgctgtagagacacttgtttactttttagatgctgttatgtctgagtttattagagacttagaatatctaagagactcagctgaaaaagataaacaagaagcatttaaatttatggagagagcttataacttttctgttgagaacagagccttaggaataggcgttcttggatatcattcatacctacaatcaaaactcataccttttgaaagtattaaagctagtcaaattaatgaagagatatttaaattattaaaagaaaaaacttataaagctagtgagcagttagctaaactttatggagagcctactattcttaaagggtatggtagaaggaattcgtgtttgatggcggtagctcctacgacttcgagctcatttatcctaggtcaagtttctaaatcaattgaaccttttatgagtaattattacgttgtagacactgctaaagtaaagaaaactatgattaatccttaccttaaaagactattaaaagaaaaaggaaaggacaataaaaaagttattgagagtattagggacaatgatggttccgttcaacacctaactttcttaagtgattatgaaaaggaagtatttaaaacatatggtgaaattaatcaatataatatattagaccaagcttctacaagacaaaaatatattgaccaaggacaatctataaacattatgattaaccctaaacatgttacagcagaggagttaaatgaactttatctctttgcatggtctaatggtattaagtcattgtattatcaacatggtacaaatgcatcacaacaattcaatttatctaaaatttgtattaattgtgaagcctaaagaggtgactaaatgaataaaaaagaagcgtttggattactaagtagaactgaagatatattcaaatcaaatgatattttctcacaagtaagtaatgtacaagaccctattaagatgtttaatagggaagatgatactaaagcagatagtaaatcaagtaaatttcagctagagtttatttataatacatatgtatacattcttatatacgaaggtacattgaagttatttaaagctgatggtatggtgcagttaacacatgtagctgatattgaaacatttaaagatattattgacacactagaaaaggatgatacagaaaatggaaaaagtgaatagtttattagagttaaatacaacaatcagacaaaaacaggatgttattgtcatggttacacaagatgagtgtgctaaatgtgaaattttaaaaagtgtgattcctcttttcgaagaagaaggagatattactaaacctgtttatgttattaacttagatgataaagatgtagatagagaaaaagcggtcaagttatttgacattatgagtacacctgtacttattggatataaagatggggaacttgctaagaagttcgaagaccaagtaacacctaaaaacttaatggaattagatttactttaatttgtaattacctactacttatgctatacttatattagtaaaaggtagtaggttttttcatgaaaggatgaatagttatcgcaaaaaataaaacattaactatatataatagtgatagatattttaatatacatgtaaaaaacaaagatgaattatctaaagctattaaagttacaactttaaatgaagatgagatagaaaaagatatggatatcttagctaataaatcaactaggtatatactaagagacgataaacattacatgctatttaatgagaagtataacaatgataagttgattgaaaaaatatgcaagcacggtggacaagtgacatactatactgattcagtagtaccatactatgtgcttaaagacttatcagcccaccctaaatcatcagttgtatatagaatgcgtagtaaattcaataacaaagagatggataatatagccttgagtttcatgggaacaaaagtcattattgatatttcagttgtatttccttacgtcaatccttacgatattattagaagtttatacgatgttaaaacgaatgtagacgaggttcatctatcattccctcgtattagttctatagacgctaaacaaggtaagtactacacgtatgataaagaagcttataaactaaaacctaggtatacgcttgactttgcagacaaattaagggtttctttgtccgtgtggaaaatgtatatctatattcttgctagtaaagaaaataaagattatgaaacaatagaagacctacttactgaattaaaaagacaaagaaagattaagatttaggtgattttgtgagtacagcaaatagaagagatatagcaagaaagatatctgagagtacagggtactatatccaagacgtagaagagatactagaagcagaaacaaaagctatttctgaattgttacttgaagattatgataaggtaaagaatcataagtactttcaaatagaagtagtagagcgtaaaggtaaaaaagcatgggatggactaaataaaacatacttcactttacctaatagaaaggcactaaagtttaaacctttgtctgaattagataaagttatagatgtattaaacaaagaggaagaaaacagttaaatattttatatagcataagatttagtatctattcttcatgtatttagttggtagtatatgtattgctattatatactatttatttaacagagattgagtcaagtataaacttgactctttttttatgctatgttatagtttaaatataaggagatgattaaatatgaaaatgaaagatttagataacttacattaagaaggatattaaacaaaagaaaatactagaaatagtaaaggaaaacccacaatctatcacaattgaaaatttaaatattaaaggtatgatgaaaaataagagattgtctaatagtttccaacaaataggattaggctacattattgaatggctcaaatggaaatgttatcaatatgatatagaactaagacaagtagatagattttacccttcaagtcaaatatgcaatcaatgtggaaatagacaaaaaatgcctttaaataaaagaatttacaaatgtgataattgtggtatgatagaagatagagatataaacgcaagtattaacttaaaacaagcaaaagaatatacaatactattataaaagaaaaagagaagttacacggtaggctatatcggaattaacgctctgggagaggtttttagacctgattgttaatacaatcaacctcgttgaatagagaaactttctaaatatacatttaagtatgtttttagtagcaggattaaattcctctttttttattgactattattaatagtcatgttatactgtatttaagttaaagaagggattggtaacagtatgaaagttttaattttatatgaccatattagagaggagcacttttcagttagtaatgatggtagtgttaagaatgtactattaaatacacctaatggtagagtactaaaacaactattgtctaatatttctggtattaatcgagataggagtacaaaggattatgacattgattttttatatcctaaagtacctacacctattaagaataattatggtaaaacaattaagtaccaagacgttaagttatctgaagttaaacctcactatgaaagaatgaatcaaataattataaataataagtatgatattattattcctttaggtaagttaggcgttaaatatttattaaacgtatcagctattggtaaagttagaggtgtacctaataaagtaactattactagtgaagataaaaaacatgatgtttgggtattacctactcatagtatagagtacacaaacgttaataagaatagtgagcgtcatgtagtagctgaccttaagttattaggtaagtttgtagaacaaggtgaagacgtatttaaaccaaaagaagttgagtacgaacttgttacaaatattgaacgtgtaagggaaatatttaataaagaagtaaagaatgataatcatgatggtgtagacattaccgcatgggatttagaaactaactcacttagtcctgatagggagggaagtaaacccttagtgctatctatgagttggaagaatggtcaaggtgttacaatacctttatataaatcagactttacttgggagaatggacaacaagatattgatgaaattctttccttattaaaagaatgggtagctagcaaagaagacattaaggtactacataatgctacttatgatataaatttccttatggcaacgcaaggtttcacaaactttgaaaataatcaagacactaaggtaggttggtatttagctgtaacacaagaacaagcagagtctctaagattatcagaccttgcttacgaagtaacagatgtaggaggatatgacaaacctcttgaagattttaaagagtggtatgtattgaagctactaagattcttatcagataaactaaaagagattaaaaaagaaaataaaaaagttgctaagaaagaatataacataaaatcaaatgagtatgatacttggttgaaaaataaactcgataacattgatatagaactaacagatgaagataagtattatggtatcacagaagagcaaaaaagatatttagagttaaaactaacacctgaggttattacaaagaatatgcttatggattctgaatttaaagaagtagccgaatcatcacctgagtatatgagtttatctaacaaagctaaagattatgtattaggtacatctattaatttaattaacacgtataaggacaatactaaagttattaatgaggtagatggaggtgactttaattatgattggattccattagagcttatgcatccttatgccagtggtgacaccgatgtctgtagaagaatatactgtgatgttattgaaaagttaaaagaacaaaatagacctaaagcattggacttaatgtcaataagttaccctagattaattagaacattagctagaatacaatcaaatggtttacattgtgacctagactacatgagtaagaatgatgaattttatattaatgagatggaaaaaactcaccaagaaattagagaacattgggctatccaagaatttgaggagactagatataatttatatcaattagccttagcagaacatgagaagaaaccatctgatagggataaagaaatacatgagtatagagctaaatttaaagatgaaggttggaagtttaaaccaagctcaggtgaccataaaggtgaaatattgtatagcattttaggtatacagttaccttatagtaaagagacagttaaggataaacctttcagtaatggtactaaagaagatgagttatcatggaaagattacaaaacagatactaagtctataaagatggcattatctttggttgagaatgaagataataaaaagctactagacttacttatttattatgcctctttgcaaactaaaagaaattcttttactaagaaattacctaaaagagtaaataagaatacacataatttacatggtaactataatagtacaggaactgcatcaggtcgattaagtagttcaaacattaatatgcaacaattacctgctcatacatctgatataaataagtttgattatcaccaccctattaaacgttcttttatctctagatttaaagatggtgtaattttacaagccgattatagtgccttagagatgcgtattacagcactatatacagatgataaagaaatgttagagatgtttttaacaggacaagatattcataaaaatacggcaagtattatgtatggtaaaagtatgaaggacgtaacagcagaagaaagacaagccagtaaagctgtagcctttggtttaatttatggtgaatcggaattttcgtttgcaggtaaaaataatatgacagttgatgaagctactgaaatatttaataagttttattctaataaacctgctattaagaagtctatagatgaaactcatgagtttgttcaaaaacatggatatgtagaaacaatgaatggacacagaagatatatacactcagcacaatctagagataaaaagattaaaaatgagggtcttagacagtcctttaacacgattattcaaggtacaggtggttaccttactaacatggctattacttatattgacgactttattcaaaataagaatatgaaatcgaagttagtagctactgttcatgatagtattgtagtagactcacctcctgaagaagttaatattatggctaaagttattgtccatgtaatggagaaccttccttatgatttcttaaaaataaaaattaatggtgagttaagacagtatcctatagatgcagatatagagataggattaacatataatgatatggtagaatacaacgaagagttaataaagcaatttaattcgtataaaggatatattaagtataaattagccttacaacaaatcaaagactactatgaatcagataaactaactgaggagcagtacaaacaaaaaacggaatatattaaaaataatattgacagtttcaaagttatatagtacagtaaaatagaggagggtattatggagatacatttagatacattagatttcaatgagttaaccttaaaagataacaatggaaacactcagacttttaatatccatgatgagctaaaacttagtgaatatacgattcaagacgaaatgtaccaacagtcgtctaaatttgcatggtgggcttcattaaaagagcgtgtgagtaattatgccgaagcagagcaacgtaagctagaaaaaataggagctcaacttaatctacaaattagagctcaatatgaacaacagggaaagaaacctacaaaagaccaagtagagtctgctgtatttctttctgatgaataccaacagcaagcacaggttgtagaagcatggaactatagagaaaaacaattgcattacattgtaaaagcttttgaaacacgtacaactatgttagtacagattagtgcggaactaagacaaacaaataaaaatggtggtattacgaatccatttacacattaggtattgacaaacaaaagaaaacatgttatactaattaagtaatttttaaaataaaaggagaaaagatattatggattttaatcaatttattaatcagcaatcagaaaagctacaatcaagtggttttgacaatgagatagaagtatacaagccaaaacaacccgttttgcgcttaggtaaagtaaaagatgctaacggtaaccaaatcaataaagagtctgcacttgtacgtgtactaccgcctgtagaaggttctaatgagttctttaaggaatttagaacattaggtattaactatgttaaaaaagatggggcacaaaagttctctatgcttactttacccgagaaagttaactcatctgttgtagactcttatgttgaaacatggctaaagcaaggtgtacaatttagtaacttccctaataaacctgcacgacgagcatatattcatgttattgaatactttaatcaaaatggtcaattagttcctaacacagatgaacaaggtaatgttattattcaacctatggagctatctaatacgggtctgtctcaattgattgatcgactaaaagatagaatgttatcaccatcacctactgctacacacagctttatttcagccgatgatgcattccctattaatattgctaaagctaaaaaaggtgaaaaatcatggaatgtaactgtttatcctacagtaaaattaggtgccttacctcaaggttgggaacagcagttatcggatttagataagttagctacaccaacagaagaaaataaccctaactttgtaaactggttgattaacaatgttaataacacagaagtttctcatgataattttaaattcaatagagaaacaaacacattagttgaagaaccatcaacacaagagcaaacacaagctcctacgcaacaaagtgtagagcaacaattacctagtaatttaggtggacaaaataacacacaaccaaactttaataatgtacaacaaccaacaccacaagttcccccacaacaaaatacacagtttggtcaaggaacacctgtgcaacaagcaccacagcaacagacatcacagcaaccaacacaacaagaacaaagtaatccatttgagaactttgatgctaataacattgacgattctcaaatcccattcaacacaaatgaatcaacaccagaaccacctaaacaaaatcaacctaagagtgtagatgatgtattagcaggtttagatttataataactttatagagtgctatcttagcactcttttatttaaatttcatataaaaggatgatataatggctagagcaaaaaaaggtaaagaagtagatactacaaatttaaatactattgacttaggtaaagaattaggtttaactttactatcagatagtaatagagcagatattaagaatatcattcctactatgattccacaatatgatagaattttaggtggaggtattcctctaggaagacttacagaagtttacggattaactggtagtggttaccttaaatagccacaatggcttataatgagttattacaaatccacgtgaattgctgggaagccttaaagacttgttaactacaacgtaactggaaacggtaagcgtgaatgttaaaaataacaagtatatgagttatatggtataacgagttattaaactgttatattatatagtgtaggtaatcagcatccaagctcctgtaaaatggagaaggttcaacgactatcgaaaaggtagctaatattgagaagtattagtgagtaactgagtagagtagggaaaccgaagtacgtgggaattgcctacgaaatctatttaaaatggagagtagtataatatggtaaaacgagtatggtctaatgaagaaaaacaagatatagtgaaatcctttcaagaaggtaagaaatttagtgaaatacaaaaaaagtataatgcacattactttacaattaaaaaagtactagatgagtttaatattgacacaaatagcaagagaagatggactagtaaacaaaaacaagatattttaagaatgtacactgaggagtctatgactattgcagagataaaagcagtctatacaacacatgcaagagagataagtaaaatattaagagactttggtattgatacatcttactatcaacctaggagagttaatagaaatattaataaagatttctttgaagtaattgatactgaagagaaagcatatattttaggtttattgatggctgacggttgtgttagatatagaagagaaggtcaatgttacttaacactagagttaattgataaagaaatagtagaaagagttcaaaaagaattgaattcagacagtaaaatttatgaatctcatagaaaaagagattatataaaaaatgaaaattctacgtatacttttagtgttaccgatgaaaaactatgtaatgatttagctaaatatggtataatacctatgaaaactaaaaaaacagattggttaacacaagacataccttatgatttaaggaaacattacttaagaggattgtttgatggtgatggttctattggatgttataataatagatggtcaataactttagttaacaatcatcctgaatttttaaaagaagtaggtagttggattgaagacttattaggttttaaatgtcctacaatatctaaaacttctacctcttatagaataggttatacaggtaaaaaagctaaaaaattaatgaaaacattatatcgagataataatattcatatagaccgaaaacaaaaacttgcataccaggcaattaaagatatagtctaagcccactattaagttagtgttaaagtactaggaaactaggggtagtaactgaaatcgacctttgcagtacacttatctagagtagcaacacaattaggagttattacagtttggattgacattgaaggaacagcggataatcaacgtatggaacaattaggtgtagatgtatctaaattgttctcagtacaatcaggtgaaggtagacttaaaaatgtgactgaattatcagtagaaactgtaggtaaagaattagaatactggattgacactttcaatgaaaaagctccaggcgtacctattttgttcatttgggattccctaggagctacacgtacacaagatgaaattgatgcaggagtagaccataaaaaacttggaacgaaagcgacaagtacacaaaaagtagtaaatgctatttcacctaagcttaatgatacaaatacaggattaattgttattaaccaagcacgtgataatttaaatatgagtaatccttatgatgaccctattaagtctacaggaggaagagcttttgaacatggtgctagtttacgtattaaagtatctaaaggtaaagaatcagaattaaaacagaatgatgctatgacaggtaaacctacgtataaaggtcatgttatgcgtattgaaactaagaagtctaagctatctagacctggtcaaaaagcggaagttgatttattatcaggttatgaagtaggttctgatgaagatactattcaattaaacggtgttgacccttatcatactatctataaagaagccgttgagcgtggtttaattactaaaggaacatggcgtaattatgttacgttaaatggtgaagaaattaaaaaatatgataaagattgggtaccgacattaatggacaaccatgaattatacttagaattatttagtagagtttaccacgagaatttccctcataagtatgcacctttaaacaatacaaaagtagacactactcaattagaagagtttaaagcattacaagattactacgaagagcttagctctactaataaagagactaaggaagatgtaaatgaataatctaatagatagaaatattaatagtgttaaagaagcattaggtagggctaatacaaatgatgtattgcccttaccttatattgaaatagcagaacgttttaaaaaagctagagataataaggagcctatcattgtagaagaagcaggtttcccttacactgattctacagttatgtatattgagcatgtagagtcaagatgggcaggaggttactctttagtacgttataatggttctgaagtcaaagtacctaaaacaatacactattctgatatctatgtatcaaatgatgtacataggattaagattgtatttgaaggagcacacccttatgaagaaagttaataatgggaatagatatattatagacttagatggtattcctactgactttggtagagatttagatatgcttttaaaaaggtataagaaccttagatggtcattatttcataggtactctagaggtatgagtcatgactttgagaaacaagagctacgggaatacatagatgagcagtttattaagttagttaaggagtatgatatacaaagtaaagtagattttccagggtatattaaaactaaactaacactacgagtacagaacagttatgttaagaagaacaataaatataaacgtactgaacttgtaggtaaaacagattatacagtagagtccttaacacaggagttaaatgtgggattagaagaaaatgaattacttaattatgtctttgatgatacacaatttactgaagtacaaagtgaactgctaaaagagctccttattaatacggataaagaagacaacgcatttattgtgtctactgtagctaataggttagaggtagaacgttcagaagtagctagagagcttacagaacttaaagattatgttaaatttaaaattaatgcttatcatgaacaaaatgccaaaaggtatatcaaagataataaagtagataagcaaaatcatatgtgggaataacctgaataagcctcccttttgttatattattagtgaaaaaataataacatagggaggttttttctatgttatagcataaaaaataatgattggagcttaaattattatggctaagaaaaatattaatgaagtattaaaacaagctactgctacagtagcagataagtatttacaagttcaagtagagcaagatggttatacacgtacacaccgaggtcagtataactacaaagtagtagataataagggagaattattcttatacccgattgaaacagatggtagaggaaatattaaaattatgaaaaaggctcctgttgcttatacagatggagaccaaattcattttgtagttaatactgttaaagacccttacaaccatgcttttattagaactgaaaatattaaaggtaaagataaaggtaaacaattaattcaagcgtttttagcattcgttgaagaccgtttcagctttggagtatacaatgtattccttgctaataacaagaaggatgtttttgctttagttgatgctgaaagtaaagatgctaaaaaagtagtagatagtaatgagaaacctcatgaagacgtgagcgctgagtttcctgctagtccgctacgtaaagacgttaaaggagtagactcaggagaaggtcaaggagatacttcagaaccttcagtacctaaaaatgtaacagtaacagctaaagaaacaacagctgatattacagctgaataattatataaaggatgacttagtttggataaattaaatttatacaaaggtgaccagctattaaaaagtgaagagaaacaagcaggtaaaacatcaattacaattgataacttaactgctaacacagactacccacaaggtacatataaagtatctttctctaatgaatcaggagaatcagaaaaagtagatgttcctgcgtttaagactaaagatattaaagtagtatccgttactttagatgtagaaacactagacttaaaagtaggagaaacacataatttagtagctacgattgaacctagtaacgcaacaaaagctacttatacatttacttcagaacatgatgatattgccagtgtatcaagtaaaggtttagtagaagctaaagcaaaaggtcagactacaatcactgttacaactgatgatggtaatcatacagatactgtaactgtagttgttaaagataaagtacctgaagctcctacaaatgtaactgtagaccctaaagaaacaacagctgatattacagcataatcggaggtaaaaataaatggaaaaaacattaaaagtatataaagatggtgaagtagtaggtactaagactgctgaacaaacaggcaaaacaactatttctattagtggtttaacagcagatactacgtatcctaaaggaacttataaagtagcatactctaatgagtctggtgaatcagaaaaggtagatgtacctgaatttaagacatcaccacatagtgagctataataaattaaagtccaacttaattgttgggcttttttttattgacttatatttatttatatgctatagttaaacaagaattaataaaggaggtactatatggatattaaaacagtatacttaatttcagataatgaccatttgaaagttaaaaaattaatggaaaataaggaaaagtatattgcagttacgtatgataataagtcagtaggtaaggtcaatatcattatggttattaatgttattaaagacctagtgcatatgtataggtataaaattgttgagtatgggttatctaataatgataaggataaggaaatggtagggtatttaatagaaaggattgaggattgatgttatttattttaaatgaagtagcttcacatacagaacatttatccgaaggtatagatatgttcgacgttgaaagtgtgatatcttttgactcggcattacatttagctagtgataatacgtatgattctgttatttttttaggttttatatacaataatgaggattacttaaaatataaagaattattaaaaggtacaaaattatactttgtttctaatataaacttacctgataacaaagattttattacagtaggtaatgatttaaagtacctatccttattagagcaacttgtagtattagaagataaagacctagacattaactttagtcggtatactaaagacacggcttctaagtacactgagttgtttagctttaaatctacttatgaggaggcaaaagaaatgggtctagtaggttaccctgcagatatagtattacctattatgactgacaagttttacaacgtaaatgatttgtatgtactatatgaagtagcacctgagtataaattacctttagcatatgaatgccttaaggataaagaaaaaggtattgttgttataggttcacaaacaagaggtactagtgatatccttactttctatgtaaaaggttatgatgttaatagtgttgctaaaacattcggagcatcttataatgaaaattctaatatattcagtatatttattgatagtcatatccatgtgttaggtgagaatatgaataagtatttaataacggaaggaagtatttatgagtaattataaaacagtagaagagttacaagcagttattgtaggtgtgtttcttaaagatgaaggtaaagtagttacctctaaatttaataaagtattatcaagttttggtattgatagagtaaatcgcaatgaattaaaagatattgtagataatattaggaaagacacatacttaaatgacttgaaaaataaagcagttaaaggtgaagtgttattagaggacttaagagatgtagaagataaacaagtatttgagggtaatgattatcatgaagaagtatcatcttatgtagtagcacatgaaaaagaattatcaagactaagagaattacgtaagattaacagacaaactgcttatcctacaattttgtttgatgaattaaaacgcactatggttaatgagcttaaaggagataagttattagaccataaagtaagtaggtatgcttctaccgaggaagaagaagagttggttgtcttactatcagattttcacgtaggatgttccttccaagatttaactaatgaatataactttgaagtactaaaaagaagattaaatcagctattacaggaaactattaaagatattagtaaacgtgggattagtaatgttacagtatactttgtaggtgacttaatagaacatattaacatgagagatgttaaccaagcttttgatactgagttcactatggctgagcaagtagcaaaaggaactagactattaattgatttcttaaccgaattatctccatacgtatggggtaacttacgttttggtatgatagcaggtaaccacgaccgtgtacaaggtaataagaaccaaaaagtatacaatgatagtgtagcttatattgtattagattctttactgttgttaaaagaaaatggtgtattagaaggtattgagattatcgataatagaaaagatgtatacactattaaagatacagtatgtaacttaaatattattataaaccatggagatggacttaaaggtaaaggtaagcatatacctaagtttattgagaacacacatattgacttattaattacaggtcatgtacatcacttttcagtaacacaagaagattacaatagaatgcatattgtagcaagtagtcctatgggatataacaactatgctaaagaactacacttatctagaacgaagccttcacaacaactactatttttaaataaaaaaaataaagacattgacattaaaactgtattcttagattagggagagataatatggacattttatcaattatagccttaacattgcttatcattattattgttaataccacaatgaactttgtaggtatgttacgtggtgagcgtgatttagtaaaaaaaggaggtaaccctctacccaattggcagtactataatgtgctactacctaatttatgtggtattatactcttaggtattgttgtttattttggggattcgatttataaaattacaacaaggatagaagttctttttgctattattgcgcttattgtaatagatgtattgttaacagcgttagtattattagtattgagtttcgtaacaaaaaataaagaatagtaaagaagggagtccagtttatacttgactccttttattattcgtggtatattagatatgaggtgatttttgttgcaattaaattttggtaaatttgataatgaaattattaagacaaaagtaagtgaaggtgtttactcttttagaggtgttccttattactacatagaacatgtccaagatgaaacttctgagtatgtattagtatataacatacatagtgttgatgatgaagtaccacaaaagaaatataaaatagaaacagtaagtaaaactattagaggcggtacgatattaagtaatacaattaagtcaatgctacctaataataagaagtataaaaaagtatatgaacctcctatctttttagctaatattatacctttaggtacagatacaactacaggtgctgtaggtaaagggtttttcgaaagagaaaaagatagagtaactattacacaaaaagaaggcactaaagttatacatggtgagtatacaggagtatttatatgtttatctaatgttaaatggattaagtcttatacacctttagatagtatattacaatattatcaacgtattaaaggggatagaataaatgtctgagataactaaattttatgagcaggacattaaagatttaattagaacgaagagacacatgtttaaagatgatgagataacaagtaatatacaagatattagaatatttaatgaaaaagctatttgtcaaggtaaatgtagaactgactgtttaattcttgatagaaatggtactgttatgggtatagagataaaaacagaacgagactctacacaaagacttaataaacagttatactattatagtctagtatgtaagtatgtttatgtgatgtgtcatgataagcatgtacctaaagtagagcaaatactaaaaaggtataaacaccatcatgtaggtattatgagctatattaactttaaaggcagtccagtagtaggtaagtataaggaagctacgccttcaccactaagaagtccttatcatacactaaatattttatggaagcaacatttaatgactatacttaaacagttaagagattataatacatacctaactggatataactatagggagcacggtaaaaatactaacaatgaaggcagttatatagaaggaacacaacgtatgagaatgaaaaagtcagctattattaaccaagttattcattatttaggtgtagagaactcttataagatatttactagaggtgttatctatggttatagtaataggtggcagatattagaagatgatttctttaaagtgatacagaacggagtgagggtattatatggcaaagaggaaacctgatgcatttaaacctaaatctaacggatataaacatcaacctgttaactttgctcctacaggtaacctatcaggtagaagtacttctttttttaataaaaaaagaaaagatataccagatgaaagtattgttgttaaatacaaacctttgtttgttaaaaggtttgataatgttactgctacagacattaaaatacaaaagaagtatgcgttagacttaattagtgaagctgtgaatataaagaagaagtatcttgtaatgaagcaaaaaggtaaattaacacaaactattttacatacggatagagtttattatgtttatagaggtaagaaattaataggtaaatgtagtattcgtgaacaacgtacatttagaggtacacatttaatctatatttttagtactagacatagaatatctgtacgcaaaaatagtagattaaataagaaaagaacaccaaagaaaatgatatataaaggtggtaaataatggttaaatacttaagaacaaaagctaaaaaaacaaatgtaagtactttatttaagaaactacaaagtaaagatattacactattaggagtgtcctatgatagtgattatttccctagtggtgtaacaatagtaccttatttagaggacatatcacaagtagaagatggtatagaatttacgaataaagtaatcgttactgagaacttaaaacctgccattgtaggtatgaataatatgataagtgaatcagggttaggttacgttaaaacagaacagttaaataaaaggttagaaaatactggattaatgacagacttattatctaaaggaacagaattaacttcaacaaagaaagtagacattgtatcaacttttattgaacctactattatgtaccaaaatactactattaataaagaattaaaacttagattatacactatcgaagatgtatctcctttaaatgattacacacatgttgtatacttactagtaactgataagcaatatgacggtcaatcattcataggtacattatgtaaccaaggtacattaaacaaattagataccctaaaagttcttacattattcaaaggtaataaattaatcaatagaagtgtgttctctgttaagctagatacaaataaatatcattatagtttatataatacacatgagaccggtattttctttttagatgatgataaagacttaattattgcttgtggtcaatcctatgtaaaagttagatataaagatattgttagtagtaaagtagagaaagttagtgataataactataaaatgattgttaatcttgttggtaatgatgagctaacaattctcttatagtataatactcccttaaatatgtatactaaggtataaatatacgtatataagggattttttatacatattttttcaagtagttagttaatttttaaaaggtattattcttattttaaaattatatttataaaacattaaaatacctttcaggtatagggttttagaaaaaagatttatattgcttaaaatatttacaatgtagtgtaaaaaatcagaatatcctttatgaaaataaaatagatgcagaaattgtgatatattatataatgtaaagtataaaatagttgatttgataaggttatgtgaatacatatactccttattttagttcacacatatgtaaagacacttgagacaagaagggaatatataatggctagaaaaaagaatttaagaaataaaaaatctgatataaaggtagttccagataaggaaagtattctatctaaactatataataataaactattaaggtctaaagtggataatgctatagatgaagatgttagttatgatgatattatagacctatgtaaagagtatgacttagagttatccaaatctgccattacaagatataagagtaaacgtaaagaagctattgaaaatggatgggatttaggagaacttattgataaaagaaagaaagttagcactactcaaatacagaaaaaagaaaaccctatgaaagaattagatagtgaaaattatacaccttttgaactggctacacagaatgtacaaacaatatatgatgatattcaaatactagatatgattattcaaaaaggtgctaaaggtttaaactttgtagaaacattagaccctgctttaatgattaaagctatggaaacaaaagatagaattacgggtaaccaactaaaaggtatgtcattcataggactaagagaactaatgattaaacaacaagcacaagatactgctatgacagaagttattcttgagtttattcctgaagataaacatgaagaagttcttcaaagaatggagcaattacaagaagagttctataaaaacttagatttagatgaagaaggaagaaagttaaaagatacattagatagagtaggctatacaatatagataatgaggtaatacatatgacagaagaaattagtttagttccaataaaagatgttaaaccacttacagatatagtagatattataacacacctacataaaggtgatgtacttagagttaaacaagagaaccagggagatatattacttagactaagtactggaaaacataagtttactgaagtgtcaagagacttagataaagaaaccatgttctataaaaggtattgggtactgtataatgtatctattaattctttactaacttttgatgtttatttagaagacgattatgtagaatctacaaaagttaagttccctaagaacacaattgtagaatacataagagataatcaggaaccagatgtagctaaggttaaagatgttttagtagatagtaacggtaattatttctatgcactttcaggagaaacatctttatataatgaagataaacttaataaaattaaaaattaatgattgacacactcatatgggtgtgttattcttttattacaaacaataaaaggagcaattgattatgattattacattaaatgaagaagagaaagcattattagaaaataaaagcaactatacgccattaagtaagaataaagagttcaatacaccaaaagaagaatatattgttacaagttataataaaggtgtacctgtgactgatattgctaaggaagctaaagtaagtatgggtttgatttatacagtgttaaacttctataaagtacctaagaaacataagaaatctagagtagcaaaacgtgtaaaacatattactaatgataagaataaagtacaagccttaattaaagattatcaatatatggacttacaaagtatctataaaaagtataacattcataagaatggtttatattatattttagatttgtataatattgaaagaaaatcagatttaaaagagaaagccttagaagatactatcgaggtagaataagaggtgtcatatgcgcaaagaacgaattgtagattacttgtataatgtaaagaacattgataataatttaactatacaaggaatagaaaatagtttatttaacaaagaatctttacaagacttagtacctgattttgatacttctagtagagagattaatgaaagtaatttatacctatgtacaataccagaagattataactccgaccacgtagaaaggggtcagtatataggtatagatgttgggtatgtatctgaagaccctgcttttgaccatttaataggtcaagttcctagaagtgtatatgagaaagcgcatgttatgcaaccactaattaagatagaaaatactgatatagattatacccaggctgatatgattaatgatattaaagtaggtacaagtattagtgatgtaaagattaaagataaattaagtttaatgtcaaataatcttattacacatttagaaattgttgataagtattactttgatagtagtatagaagaaacattattaaagtattatgagttaaagaatcctgactattatttaaaacattttcttaaactaaaagaacttgtcggagacaatagaatgatatactgtcctctactgttaaaatgtattaaagttatagactaagttattatattataagtagtaaaggatggtgcgctatgagtaaaaaagcaataattgcttatgtaattatcttagttatgttagctttatctatatctacttattacgtgtcctcatatttatatcatgaaaaaaccaaatcacaagttacagaccaattaacacaccgcggtaaattaaaaaaagataaaaatgtagagtatgtaggagactatacgcttaagaaagtaatagacaacaaagcatactttatggaaaaactacctacctatttaccaggaagaacaagtgataaaagtattgatatgagatattataggactagtaaatttagagaaggtgtaaactttaaacttattcgtgtgtatacggaggataatgacaataatccagtacataagtataggtttgaagcagtactaaataaaaagtaaaggtatgatagtctatgacagtagtaattatactagtatgttttgctattatatactatttatttaacaaggattgagtcaagtttatgcttgactctttttttatgctgtgttatagtttaaatataaggagctgataaatgatgaaaaaaagtgatttaggtaatttgcatattgtggtcgtaagtattaagaatggtgttttacctgatgagcgtataattccaattggtttagatgtactaagtaaagtattagagggtaaaactatatggacagttaagaaagaaattaaacatacatttggtaaagatgaattaaaaatatttaaagataattacaagttcttgcaacataaaattgtagaccttgctacaaaaggatataggtaggtgatataaatggatatagtagataaactcatgttaggttttattttattgttttatgtaggtgtatttatttggtacttatgggaagtctggaaattaacttctttaatatctgatatagttattaagtattatgttcgtaaggggtgggttaaaggattactaccttatttgattcatcaagttattattacgttagtttgggctactctagtattagtaccttttatacttagttatataatgatacaatatttgataggaggttactaaatggaagtagtatatgagaatgaatgtagaggatattatatttgtgtcatagataatgaaggtaagtatgaagtatcatcttttaaaaaatcagtaaacaaatatacccctgaaattatagggtatactacagaaaagttactcttggaattaaaaataccatgtacatatgtaaatgctagtgaagtagaaagttttatgcaagaattaaaagtagcacgtattgcgcttgacaagtttactaaagatttatataataaaggcataacaaatattatattctaaagggtggttagtatgtatacagaaaaatatagaaatttaatccatattacacatagtatcttggttagtattcaagaattagcaagtaatttattaaataaagaagtaaaactagttacaaaagaaaataagtatttatgtgttgtagatggtattattatgttaattgttgaggaaggattagtatacacctattttgataaggtaggtttaaaagtgcctgaacgtattgcacttggtcatttagcaaaaagtttacagtttacaatatcagaatcaaataaagatttagaaaatcaaaaataagtgttgacacctttaacatgttgctttatactaagagtaacaaaacgttagaggtgattttttatgtgtaaagaaaaagttcatagacagctatctaatgctatagaaatattagcaacttacaaagagtggtggtcttttccaaaagaattaagtcccacagaaacatttaagattattaactggaaagaagatacattagtatttgaagttagagataacggtaattatataggtaggtttagtgtagcaactcctattattgactttcattatgatagaattaaaaaaacgacagcacaatacatgataaattattttgctaaactagtatgtaaagatatgtatacgtattataaattacagagaggacagtaaaaatgaaaaatttaaataaacaaaaacgcttgacgttggaattgattagtgataatctaaatacacaacataacttaaatacatcggttagtcttgtagattatagtataaaagactttacaaataagaaagtatatgtaagaactaaaaaaggtttagaacttactaatatgaaaagtttaaaaagtactgagtcattagatttattatttaagtatctagaattaattttaaaaggagatgtataacatgctaacgccagaacaaagaacacaattaaaagagtatcaaaataaaatgacaaaaaagaaaaaataaatgttgacttactaaataacaagttgtataattaacttaacaaagaaaaaggagattgataaatatgaaaaacttatataaaattttaacaggagtattctttagcgctacactattattaggaggttgtgcttactactcacaagaagatacaccaacacatgattataaagaagataagaaagaaactaagaaagatgattcatttaaagtagaagaacaagaaaataaacaaattcaagaagacaacactgttcaaaataaccaacaagataatcaagtacaaggtaaccaagcacagggtaaccaagcacagcagaacgaacaaatgcaagaagcaagcagaagtgaacataatggactatctaatgctgagtacgcagataaatacaatcagtatagagaagctcaacaagcacaagcagaattagaaaacagaactgaagcagataaagctagtggtggcggaggtgggggagcctcatggaactacgcaggagctaacgaaagttttgaccaatggttacaacgctcacaacaagaaagagccgaggcaggattacaataaaattaataaaagatacaggagaataagtatgaaaacaataacacaagaagaactaaataaaattctagcagaacataagctatggttagatagtaatagtcaagaaggtaagagagcagacttaagttatacagacttaaatgaattagaattaataaatgctaagttaatgagcgctaacttaaaaggtgctagcttaaaatattcttctttagaagatgctgatttaaggggtgctaacttaaaaggtgcggacttaacaagagctattttaacctgtgctaacttaagttatgcagatttaatagaggctaacttacaaggtgtggatttagcaggagctgatttatattatgctgatttatattatgctaatttaacagatgctagcttaaatgaggctaagttagaatatgcagacttaacaaataccgatttaacagatactaatttatctcaagcatccactcaaaacactaaaggtttaaaaatttattctatagataatattggaacttttaatggtaaagtaacttatattcctagcttagataaagtatttgctgggtgttggaaaggaaccttagaatcgtttttaactaaaggattagaaatgaatgaaggagacagtaataaactggaggaaataaaagatgcttactacttttttagaaagcgtaagtagatacaaggatgattaaatatgaacattgtagaacaacgaaaacctataaaaagtaagcatgttaatttaactaagcatgcatatgaacgttatactttaagagttagtaacgatagtaaagaacgtgcttgtcagtggtttgctagtgctttaatgcaagctacttttgaacatacacaaaaaggcggtaatgaagtatatgtatttaaaaattatagaattgttattgataagcatctaactattattacagttatagacactgaagatgataactgggaaggcataaaggaagcaagagaacaaatagatacgtatattaaaggtaagctaaaaagaactgttacacctctatttactaaattagatagaatagatattagtatccatgaagcacatatcagcatgattaaaacaagaaaccctaagacaaaagatataattaacaaaaatattgttgaacttgaaagaaataaatctttactattaaatagtatagaaggtgtaaagaaaacagcacataagtattatatagaattaaaagacatacataaaagattaaaggactgataataatgtatttaaaagatttaattgaggattatgtaaatcaagacaaagaagtaattataacaattacaagcaacaaagtaattattgaggtagactatgatgttatttgtttacctaagagtaaggttgatattgatgatttaaaagcttatgtgtacggatttaatagatttaatactgagcaaattacattaaaggatgtggagtaatggaagaactaaaaaggataacacaacctgaattagatttattgatagagaagcatgaacaatggttagctacaaatgaaaaggaaggagaaaagctctttttacagtgtgtagatttaagaaatcttgattttcattccgctgaccttcaatattcaactattgtaatgtctagtttaagtgatgctaacctaagttattgtgatttaagttattctgatttaagttacagtgagtgtatatctactagatttacaaatgctagaatgagagatactgagttgcatcatactaacttagagggggctaatttaataaaagcaaacttagaaaatgcctgcttaactgaagctaatataagtgaagcagacgctagatgggctaatatgaaaaatgctaacttaagtagggctaatttaaaaggtgcagatttcggtggtacaaacctaactaatacaacattatattatgctaatactcttgacgtatttggaataagtatatatactataagtaatgtacttgattttgacgagcatgtaacttatttacctgattatgatagaattattagtaattataatgaatatacccttgaagagtttggtaaactagaacctacacttgagtacgaagaagatagaataaaagaagtctcaaagaaaattaaactagcttacgatttctttaaaggagtgaaagaacttgataaaatttaattcagacaaacataaacatatacttaatgttatggatagattaccatatatttgttggttagatactgtagatggtgagtcaggtgctgactttttatgcgtattaaataggacacattatgagcttactgaactaggtataatgatttatagttatggtagttggtatatgataccatatgacaaagaagatttaattgaatatgcaataaaaagagatatagaggaggaaagggaatggtaggtatggtgattacatttttaattgttttaggtattatattgctaagtgtactaattattgttataccagatttaagcaaagcaaaaaaacgtaaagaagatgtagatattaactatagtcaatatactaaagacatggcttctgagtactatgaaaagtatataacacctatcgaacacattattcaaactaaagtagaagaggtaattgaaaatataaagaaagaatataatgtctctactgtaattattgactcttctagtaatgaagacaaaattatcttacatgttaacgataagtacttaaaaaaggtagtgtataaagatacgtatgaatacatctacgattctaatacaaaataccaatacattattaataatgtaacatatgagtcaagtactttattaaaacaagatgaagtaaataaattaaaagatatacttaataaagtacctgtcacagctaagcatacatttaaaaatgagttgcttaatcgtaggaatgaatatgtgttaggttatattacaatatatatttatggtgatttaactgctaaaattacaaagaatagttatgtacaaaactttagtacactagaagatttttgtggtaagtatgaagcttactgtagatttgttagaattgatttatatgactgggtaaaagaagtaagaactattaatgggtataaattaaaggtagatattaaaccttattttaaaattactgctactaaaacaagtaaatacgaatttgtagtaagtgatgatgtatctaatgttaaggtatatagagatgatatgctactaacaaacaggtacgtgcaaaaagcaattgatatacaggaaatagtagaggaaacattgaataataatactgtggtattttaaaaaaggaggaggtagggaaattccctactttttttataaataagtgttgacattgttataagtgtgggttatacttagtatacaaagttaaaggagataatcaaaatgaataataaacaattagaacaattatataatgaagcaaacagggtgttgaataaagatattgatgatgtatcatatgtaaatgcacatagaatgattaaagactttttagatttacctatcgaaaacaaagagaaaagagagacattaaaagagttgtatcttattctaaataaattttataaggtgggagaataatgataattcaaaagacatatacttgtaaagaattaatagaaaaatactttaatggttatttaaaagaaggtacttacacaggtacatccgatggcttagatacttattaccttctgttagaaaataaccgtatgactattggatatcaagtacctttggacgctagttttatagtagaagaagaaattactaatgacacaaaactagaaaactgctgggtattattaaatagtcatgcaaaagaactattcatggataacacaggtaatgtgagtattaatgattgtatagaaatatacggagatgaattattaactatcagtatcttaatcgatggtacctttattaatgtatggagaaatgatgattattttaatagaggaggagaataatgaaaacaataacaaaagaagaattaaataaagctctagaagaacataaattatggatagaaagcaatgaggaagaaggtaaaagagcagatttaagttttacagacttacgtgacctagatttaaaggatgttgatttaagagaagctaccttaataggtgctgatttaagttatgtagatttaacaggagcagatttaaggcatgctgatttaagttgtgctaaactaatagaagttaatttaacagaagctatcttagcatatgcggatttaaactatgctgatatattaagttctagcttaagatatgcttctttagaagaagctaacttaacaggtgttgatttattagatagtgatttaacaaatgctactttaatagaggctgacttaaagcgtgccttcttatcaggtattaatttaacaaacgctgatttaaggtctgctaatttattagatgttaacttaagctaggttgatttaacaggtgctgagctgtcttgggcaagtactcaaggtattagaggtttagaaatgtattctatagataatattggtagttttaaaggtaaagtaacgtacctacctaaatataataaagtatttgcaggatgttgggaaggaaatttagaagaatttctaaaaaaaggattagaaatgaatgaaggagataataaagagcgtaccaacattgtactagcttatcagttctttaaaaaccaactataataatttaagtatgagtatttcttagtaagtaataagtaggataaaatatcctacttatttcatatataagtgttgacatgaataagtgtaaggtttataataagtatataagttaaataattatagaggagacattaatcatgaaaaaaatattaagtttagttttatccgtattaattgtactaacaataatcaatgtgttgaaaaaccaagagcaagtagaacaaagtaaccaagaacctaacaaccaagagcaagtagaacaaagtaaccaagaacctaacaaccaagagcaagtagaacaaagtaaccaagaatctcaaaataatgatgcagatgaccatacttcatacgtacctgagaataatggagaacataaagacgttagtgaagaacgtaaaagattatggggtacagagtatcaagaaggtgaaacacataacccaaatgctaaagtgtttaatcaagatacaggagaacaggttcaataaagagtaagaggagcacttattatggagtattggaaagaacaagatatatattattcaaaaacaaaacaaggtgttataagctatatagacttatcttccttacctaaaaagaagtctcgtattgattgggtaaatgtaaaccattatataccctttgagtatcatagcacgaaaggtaagctctatattaaataccttacaccaactaaaaaagaatctagagtagaaataacttacaacaataaaacccaagctacccaagtagctaatgtctataaggttaaattcaactttattacccaaggtcagaagtcttatactgttcataatataaaacaaggagatattattaaaaattgtgaagtactaaaagtagtagacactcatttaggtacacaactttatgtatataacataaaggaagaagtctatggtaaagtaagtaaacaaaatttactaaagtataaaactgataactatataccatatggtactattcctcaatctaagatgttataccataagaaacatattcataagtatgttaaatataaagacttatttaaatataagtatacaactaagaaaaagatagaaacgatttgccctaattgtaaaagaaaaaaagatattagaattacagatttaattaaagataactatagctgtcaatgctctaaacaatactctagcttcggagaaagattaacacaaagttatttagatattgcaaacatagagtatattagagaatataaatttaaagaattaggtaaaaaaagatttgatttttacttacctaagtataataccgttatagaagtacacggtgttcaacattaccaagaagtcagtggatacatgaaccaccagaaaacaaaattatcagacatagaaaagagagaatattgtaaagaaaatagtatacaatatatagagattgatgctagaaaatctacctttaaacatatattaagtaacctacaaagaacatttaaatactctaatatagatagtaaagaagtaattaaaagatatagacatgtatataggtaagtgtagaagagtaaacaaccaaacagacaaacaaataggtatagagattgatgtaggtagaagttatataagtaagtaagtaataggtaaaagaaagcaatatatatatataagtagataaagaaacaactgatattataattacctatatatcaaggaaataagtaatagataaaaaacaataattgctagtacatagataagtagtaggtagtaggtagtgtataagtaatagctaaatagataagtaaataaatactgtataacagtttgaagatatgaataagaagaaagaattattaagtaacttaagtattaataaatattctaatagtaagtaatagatattaagtaataggtaagtaactaaaagaaagtagctaccactatcacttaggttaggtaagaacagttacctagtaatttctttacatcttctagatagataaataagtggatactaagtaatagctagtaagtaattaaaagaaaacaggtacatggtatacctatatactaagtagcaagtagcaagtaagaacagttacctaggaatttctttgcttcccaccttcatagtgtataaatagttaggtatctaactattagacatctaactattagacatctaactatttatttttatatagttttaactactgtgaactatgcttatgtagtattaaactatgctgattatatgctaaactattctaatgtatagttaaactaagctgaagtagtatttactgtgtataaaggtatatttagtattagatgttgtgtatatggtatactataattctgaacattacttatttaatatatatatatagtttgtttatgtggtagtattgacttaattttccctagagtaaaagtttaatatatttagtaatttccgaacaataaagaaattttaactattttacacatatgtgttgacagtatattacttatggtttatactaagtatataaagttaaaggagatgatttattatgaagattaaaagagaagtttcgtttatagaattaatgtatatgtattataaaggtgatataaaaaaaggtcaacactattctactgatagtcagtttattgttgttataactgttgatgatatatcgttttataatgcactgtatcctaataaatctattactattactatacctaatgacactaagtttattgtagaagcggttatagatgcttctactgagttaagtagtatagtagttacttataagcaaggtaacagtgtattaaactcagtatggtatagaagtagtattaatgaagttattgactactatgtcgaaggtaaaaatacatggttattgtctgttagtactgttgtagatgatgagttagttactatatggaaagatggtaacgtattgtgatttggtatatagtaatattcagtatacttatatatgtacagcacttgtattattatgtgtagtactagtatatagaggggttaaataaccgcttcaataaagacttagtaacgaggagttgtattatgagtttatcagatatttatgtacatttaaatcagttaggatataaaatagaagttttaggggacatgagtacattaaaagttaatgactactacatcgaaaatagatgtatagatagtggttttagggttacaggggataatgtatttttatctgtatattatggtgaagacgtagtaagattctttaaacaaaggttattaaagtagtattttgttaagttatacttgagaataattataaaggaggaagtaagttgagtaaagcattggagtttattttacgttatatattttgtttagcaggagtaattttaggtatgtgggtagggaatttaatcataggggaagaggtaattcctattacatgtttaattccttttgtacttgcttttatactctctgtattacatcatatgtctgataggaaggagagataaatatgataggactaacaatgttacttacaatagtagctgtaatggttttgtttatgtatacctttattctagtagaaatggttcagtcaattaagtatgataggtttgataagtggactaatatcgtatcatttacagttatgacggttgtactggtatcaagtatattagctttatttggtatttaggaagcggtttttgtaaggtaagtaatggaaataaaaaccgcttcaataaaaggaggggttagtttatgagtatatttataagtatcgttgctatatttttagctactattggtattgtactaagtataaggtttggtaagaagtattataagcatgtacttgataattatgatagtgttagtgatttagaatcatcttgtgtgtttggtttattatttatgagtatttgtattggtactatttctattgttttgagtttaggttatctaatagttaatttgttacattgttaggtgtatttaggtatatagattagggcatattaagtaagggagtttttagatgttaattttaagttggtttattatcggcatatatcttgcttgtttagttactattacacttttttctattaaagatagggatattattcctgctacactaggtattgtagctcttattatagttattattcttatatctaccaaagtgttaaatatgtagcttaagtgagattaagtaaggaggattataaatgttaagttttattttggtatgtgttgctctaggtatttcagaacttttcttacttactattttaggtgttatcttagtgatatctattaaagatagggatatagtctcagctatatttgctattgtagtttttattataatgagtatacttatatccgcttcagtactacgtatgttaggtatgtaatttaaaaatgattaaataaggagggttatagatggaaaaactacaagtattaaataaggtattagaaaacaggttaggcataaaagcgtttacgtattctcattatagtaagcatgccagtaacggatatatttacagttttcatatgaaaaaagaatcttttacttgtcatattgttgtatatgatgttagttgtgaaggtttagatacatatagagtaaaagtactagacaaagatgataaggtacatgtttcaactttagatactttaatagaaagtatgtatgatatactactatatgaatatgataagtacctaaaagacaaagaacatcaaaatgaaatttactctatgtttgataaacaattagatactatttaagaagaggtttttctctagggaaaagtagtcaaaggtaaaaatagggcttgaacccgcattctatggttgacatttaggtaaaattagatagattttccctagaagaaaagtttaaaaggtaaaaaaggagttggttactatgtcaaaattagctaagttttgtaggaagtatggagaagttactggcataatggagaatattacagattatgaggtgtacttaggtaggggttataaagtaaggtgtagagtaggtaatagccttatttatattcttgtatataaagacaaccatatcattgctaggtttgaggaagcggataatatagtatttcctttgagtgatacgcttgaggtgggaacaattaaagacttagaggagctagaaggtttgtatactaatatctatatattactagggtatttatatacagaatatgaaaataaagttatgtatgagtatgggaggttagaataatggatattatggtaagtgaattatttgagtatatattaggtcattgtaactttggtagtggggattggtatacttatgacttaggtgaaggttactgtattaaagttaatgatgataaacattataataacatgaagtttatcaaaaatggtagagtagtaaaagaggttattaacagtgacacattactacctaaaggattcagtagtatctatagtcttattgattactatgaggaatctttagatgaaaagtgcagaaaagaaaaagagcgtctaaaggaaattcgtacgttcctaggtaagtagagtattatatataaccgcttctatatgaaaatttatacctatagctattataactataggtatttttttatatctcttacataaatgtgttgattttatgtgtgttaaggtttatacttagtatataaagattaaaggagtgaatataatatggatatgaataaagaagtattagaacgtttagatagtttaggtggtaagttagagcaagcaggtacacatggttatgaatccttaattaaatacacagttactcaaggtattatagatttatgttcaataagtatattattatctataacagctatcttatgggtgtctttgtataagtcagataaaaagtctaatgaaggtcatagtaccctattatttgagtttgtttataagaatgaaaaagagctttctgctgcaggatgcacagtaattatatttgctgttactttgtctattatttcttttttagtgctattaataggcttgcctattgctattcaagagatttttaatccagaaggatatttgattaagagtacgatagataatttaaaataattgtaaaaataaggaggaaaatataatgttagaacaagctaaaggcataactacagattatattatggaatttattgatgaacatgagcattatttctatgaagacttacacaagttagcaggggagttagtgttgaaagatacacatgacacaaaccctattgttattaatgatggtgatggttactcaggtactattatatctaaatttaaatcaaaggtagagggtgttccagatatcactgttagtgatttttacggttcatgctctttctgtgatactttaactaatgtatatgaagatagtgatgaacttgagataattagagatttagctactatggtactacatacaattcaatctatggaagagcaagtagaataatgtataagggagtgctataatgtttaaaaaaagaaaagaaattaaagagtataagaaacaaggttactctgttgagtatataggaagtattttaggtttatttggtattggcgatgttttatactatgtagaaactaataagaaatacttaaagtcaattagcgtaggtaaagatgacaaccaatatgtatatgactttaatgattatgaatatctatcaaaacataagttaaatatcaaagaagaagaactaatgtccaaagctatttctcagttaagtatcgagggtttaaagaattttaacggagttaggcatgtttgggatgtagatgtgataacacaggattttaatatacatcgtaaagatattgatacggttaaacttaacctaagttttgatgaagagggtaacctatattatgaattagaattaggttggattaatatttataaagagtatacaggtgtaaaagactttcttaatacagtagataactatctcaacttcttctataaagatgtagtcactagcggtcttggattaaaacaagtattatataatacttttattggaggagattatgagtttgtagtatctccatataaggttgaagtatataggggagctgagttaattgatgtaaagaaattttactctgatacttatgacatttattactatagttacggcaccaatgtacacatagctttacaaatgattaagtactatctggaatatcctatgaatgaagtataaccacttcaaatattatataaaaggagttcttaatatgagtaacggaaaagtagcgttaattgggagtaaggtattagaagattataatatttatacaatcatagatgagaatcatatatacttaaaagatagtattgatgtggcttttaatgatgggaaggtactacctatatacattgatagtgtattagaacaattaagtaaagataataaaaatttatatttttctgaacaagatatagatattagtaaacttactgatgacgagtattatacagttactaaaaaataaaaggagaatagataatgagtagtaataaaaaaatagcagaaagagttattgagaaatttttagatgagactaataaaggtgtagattttactaatcaagatgaatttaaccgcttcttagataatacagaagacttgtatgaagtatctgaaactcaaagagataagattattaagtgtttacaaaacattgtagttactatatttatggataaggagaaataacaatgaaaacaataaaaagaaaaatagtacaagaaggtatgaacaaagaagaaactatgatggaagacgattctgttgtaatcaaaaaaattcaaaaagtaacaggcggagctattcttcctttagccaatgacaaggaatatgtagtagtgtttagtaaagtagaccctactaaattaattgtatttaatgtggaaagcaatcaaatctatttaagtggctctggtttcgatagtgaactgtcttatgtagacagtaaaagcaaccctattaccttagaaacagttaggttaatcactaatttattataaatactattagaagtggactattgcccgcttctttttttaaaataagtagttgacaagtatgtgagcatggtttatacttagtatataaagattaaaggagttggttattatgaaaacaattacacaagaagaattagataaagtattaaaagaacataaattatggttgaacagttatggcgtagaagggactagagcaaatttaagttacactatgttgagaagtgttaatctaagaggcgctgatttaagaagagctattctctgtaaagctgacttaagtcatgcttacttaacaggggctatcttaagagaagttgatttggatggtgctattttaagtcatattgatttaagtaacgcggatttaacacacgccagcttaaaatatgttgatttaagatacgctgatttaagctatgctattttatcatctacatatttaagtagtgctgatttgagattttcttatttagataatgctattttaaagtttactaatctaagccgagcaagtataacaggagttataggactgaatatttactctatagataatattggaacctttaatggtaaggtaacttatattcctagtttagacactgtatttgcaggatgttgggaaggaaatttagaagagtttttagaaaaaggtttagaaatgaatgaaggaaaagaagcggacaagattaaaaaagcatatgaattttttaaagtgtgtacagattaaaggttattaggctcttaaagattaagttattttataggataaatactactagaaaatgattatcgtttaatatagaactataacgtccctagtttaagggtcttaaatataaaggagggtattagaatgactaaagttgtaagtagaggatatagttttgaagaacaagaagtaagtatgaattataaccaaggacaatgggtgatttatgcaagtagaaaaccttatattactgatattatgaaaaagtaccctgataaggtggaagtattagaacaattagaaaatgaaacacctgtattagtgaaagtagtacttgatgaagatttagttacattaagaaaacccttaactaaagaacaaagagaaaagaaagcagaaattgctagagaaaggtttggtaagtaatgattagtactatttcagtatttttaattgttttattgacagtgatttttgcttatgttgtgttcatactagcttttatcactttctttaaagataaagagtatttagaatctagcatttttctatttttattagttgttatgactttaactattataggaatcacagctagtttgctgggttattaaccattataataaagaactacgttatagttttaagcattagtcatataaaaaggggtttataatatgaataactatataccagtcattacacctcataatgatggaggtgcttctactatagatagtagtaatggtaatcatactgtggaacataaagaacaatgggaaccttgtatgaatgagactgaggctatgtatactgtatttggtattgtattatttgtcataataattatttttgcttttattgttatggctaaacttaaaaagagtaagtagaagcggttaatctatccgcttcttttttgttgactatagataagtaacatgttataatgatatagaggtgatataaatgactaaacaatttaagaataaagaagttaacactgaaactggtgagattagatacgttaatcctatctggagaccttattttgattctacagactatatatcatatgatttaatacaaggtaaagtagaacgtaaagagtttgaagagaagttctttaactttattacagagttccaaagtaacttaaaagacaaatataaagctacttttgctgatattggtagattatctttattaatgacttatgctagttatagagataaggaaaaaggaaaacattatatattaacagataacaataaagatatgactaacaaaagattatgtaaggtttggaaattaaactataatcaggctagaaacattaagaataacatgaagaaaaaaggtttactgggagaagatgatgaagggctatatattactgatgatataatgattagaggtaaagtataccctaaagaaaagaaagagttaaattattatgtagtatttgataaacctattagggatttatataatgctattactgaatatgaagtaagagatagtgcaagtagtattggtttattcttatctttaattccttttatcaaagtatctacaagtaagaaaaagaatacagataaaggttctaataattctttagttatatctgattgggatgaggaaactaaacaatatatacctttaaataaaagtactttagctaaaaagttaaaagtagatattagaacattaaataggtatttaggagaattaaacacaaagtctaaaaagataacagatagatatttactatacgatattaaaccaacagggtataatgaattagataaaacaattatggttgttaatccatattacacatacacgcaaggtactggaagtaaaccatttagcttacttgaaggttggattaaagaagcggaaaaattagaaaataaataggataggttgaacgtataatgataaatagtgttccatataatcaatttgaacaaattttgtaaatatataccttgaattatttatgtaaataactggctcagacgttcaaaaataggtgttttaactggtgagggcaatcaaagtaaatttcttaaaacccttgatactgtaaggtgaaagcgtaattttcataagttttgtacctacctttgttagtggagataatacatcttgaacaaaggtaattaaaacctgtcttatctgaaatgtttacatatttcatctaatccatttactttgccaatttgcaaagtaaacaaaaaaatgagggaacagaactcctgaagaccaaggagttctgttccctcttattaattattaatttaatatatagtaataacaggttatatttattctaattactttacctaacaacctattattaattaaatgattattaatacatacagtatataactataataacccaagattagtattatcgtagcgtagtggacttttataataggttaaaacaagtaagtataatactatgatttaagttgatattcaaaatatataggttgaagcggttaataataactataagtataaatctatgtttttactaagtacctatctacaaattaccttttagtataagccatttaaaccgcttctattaacaagtaagtataataggataaatattacctaaataatattactgttcaaaatagaccttaaaatgactaagtagcaggggctaaatttaccttaagtataaatctacgtttttactaagtagcaggggttgtttttaccttataataaccgcttcaataaacataaaaaaaactaaggtaaatataccctagcttaactatatatattaaaatgtatcataatgtattgttaatgttttaaaccctttatcattctctatttgttctatagccttaataacaactttattctctcttaaccattttgaaatctcatgtgaaccttgttcgtgatatgtttcttcaaatactttaatcatttgttatcaatcccttttatattattttgttaaggtcatttgattaccttaattacattataacagattgatttataaatgcaaccccctttctcaaacttttttaaaaaacgtgtttcttctatacaatagtaaaaacttttcttaaaaaacttacaataacctattgactttatatagaaacttctgtaatataatagacgtagtaaataatatgaaaaggattgataacagatgaatgtaaaacaaattggagatatactaatgaacttattagatatggacggatataaaagcagtaactactatagaaatgacttaaaatattcaacacactataatgttcaatacttagcttatgttgatggtacttatgaaacattagaactatttaaagaaacaaaactatttagcatatcacacacaaacaagctacctattaatattagtgttaaagtagttaatgaacacttatttgtagaaatgaataacatattatacctagtggataataacggtaatataattaaagaaaaaaacttacaataacctattgactttagcactaagatactgtaatatagtagatgtagtaaataatatgaaaaggattgataaacatgaacagatatttagaatacattaaaggtacttacaacagaattaaaacacaaggcacaatatcaaatgactatagactatggtcagatattgatgaatgtgatgacctatactatcatattaataaagcttgtcatagtctttataataaaggtgtaaaagaaattacagtgacagacaaatgcattaaactaacacttgataataataaaacaaaatttattaaaaaagattaaacaaacacttgactttagaaataatatactgtaatataatagatgtaataaaacaaacaaaaaggattgataaattatgaaaacttataaaaatttagaggaattaaaccaagattacacagttgttagaacatataacgaagcttcaagcaaacataatgatttagatgttactgatatctatgtcaatgattggggtttactacagtacggcatttactttaataaatttgacaacgtgtacaatgtagtttcaatgacaacaggaaacaaaaaatacaacattactgctcatgaacttgatagctttatcatggacgagttaaacaaacaattagagttatttattaatgcaggaagattataaagagggctaattataatgattaaatttaaatacaaaggtaagaactaccgttcaacagaaaatactgacgctattgtaactatattaggcggtacgacaataattacattaattgattggtttatcaggttacaagacaatattaatatctttattaaataagggttattagcccttattttttatgcttttaaaccgcttcaatctagtgtaaaattgcccttatttctttaataaaatactttacatctactagattatcatgtaatataatagatgtaaggaacagcaacacattaaaaaaaacttcttaaaaaagttaaagaaaagtgttgacacttactaaaatacatggtaatatataaatataaagaaaacacaataaacgaaaaggattgataaattatgaaaaacacaattaaagaaatggcaaacggaaatactaaattagaaagattattagttttagcaattgaggaagcggttatgacagagcttgttgaatatgatgcattagataaatacaaccacttagaacaacagttattaaacaatgaagcattaacacaagcagaacgtaaaccatctaacattgattatagcacttacgagggagctatattagcacaagacaaagcagaacactttactaacgttatcttaaaccacatgaacaaagaacaatttgaacaaatgattatggatattgaaacactagaatttaatgcagaacaaatgctattctaaggagacattacacatgaacttaactgaaactgatttaataaacctaatggacaacgttaatagccttgaagatatagacaaggctattaacaaaagcattacaacaaaaggcagtgataaagacgcgggaactattaagcattacaacagcttagacgaactaagacaagactatgatatatcaacaatggcaccaagcgctataaaagaattacttaacttataatagtgtaaaacttcccataatatttaactaaaactattgcaattaactgtatatttgatataatgtaattaaggaaaaacaaataaacgaaaaaggattgataaattatgaaactaatgaagcaaatggaacaaacagtaaaacttgaaggaatcgaacttgaattcttattaacagctttttatgaaacaatagaaatagacgtgattgaccatgatgaattaggtaaatacattcatattgttaaccaactaaaagagaataaagctatcacagcattagaacatataccttctaaactagactttacagacgatacaacaataagattagttcataataaagtgtttgagttagcagattatataattgaacatatgagtgttaaagagtttagtaaacacattaaagactatgaacaaattaaagcagaagctatagaaatgatgtaaaacaaattgaaagggaataaactccctttcttttttttattatttattaggattgtatacaataggttaatataaatatattatacgggggcaggggtaaaatgccactaaagtgggtgggtctgacagggctatggggctacctaaggaacctaattagtgagtaatattatataacttattattaaaagtcaacattaaccattactttattaaactatgtcaacattactaataactaattgtattcattttacaataaagttagtaatatatccccctcttcccttacacttaattagagtattagtatattacagcatataagtagtttagtatataggagcctttccttatatatagttttctatggtattctttagtataccattttaataactagttatactatgtactattagtagtgagtaatattatataacttattattaaaagtcaacattataaagtatataataataaaaagtcaacatagttttattattattattaaagtaaacatggtaagatttcttttactgttatttaggtgtttaatgtgacatatcatatctatattcaaataattctctatctacttgttcgaaacctttctttttatcttttataatatagttaccatgtaaaactttttcaatacctgaaggtgcattaataaacaggctattgtttccttgtttgtctactgctctaaatgtctgaccttctgtccattgattgatgtcattcttattatagcctgtatattgaatgtattctactatgtcttccatgtctattatgaattttagcataaactctcttactttagcatagtcatctgtaagggtatctaagtctaaaggttttacttttgctatattgcttatactacgttcttttacaggtgtttttgcatattctaccattaaatcaaataactcactatctgtgcctaagcttcgaaaagaatatggttcatttagaaatacccaagcaataggttgttggttttcttttttaataagtattttttctttccttttggtagtattcttatttgctatggtaacagtatagcctaactgttttacattttcaataaattcattagtatacataaataatacctctttatttattatctataatttctatttcatgaattgtaatcatatcatctctaaattcatctatatgtttaaggtaagcaataccatcatgatttctagacatgccttgtaattctttgtatcctttagatttaatgtctttaacaagctgttctttactagtatatattttatcttctctataagagtagctgtcttcgtatagctcacaattatcatgctctacttggtaatatttcattcttttttactccttttttcatagatatttcctacaacttcagtattaccaatctctgaaatgcacatcatagagaatggtatgtaatctcccccttcaacccatccaaaagaagcttctttaaatattacaggtctacaatccccccaatatctaagtatatcaccttcaaatatttcagtaccattcttatcttcaagtcctgtagattgcataattacaaggttttctcctaagtaaccatcacaagcaaataggtgtgaatatactgtatggtctgcaaagtcaaatctagcaatattaaacattctttgtgattctttatcccatgctctaaatttcggtatcattctattacctccaataaatgagatgattcaaatacgttgcctttaacctcacagtcgtacataaggaaagattttttgtctgtatactcaaagtaatcattttcagagattgcgctctcaaacataaagtcttttaagtgaatgccacttacaacatcaatagatatcactgctctgttaattgtttctactgcagattcaaaatcacctggtattgctaacacttcatcttcgaactcaataatatcaccctcatatattttagtaccgtttttgtctttaagtcctgtgtattgtagtaactttatatccttagaaaaaataaaattaccatctcctaacattatttcctcatcttttttccatgctttaaatttagacattattctactgcctccactttttcgacccttatacttgcagttttgaatgagagctttttacgagtcagttttaacgccgtatttatggcttcttcctcattcgtactttgcacagaataatgcttttttattttgtaatcacatttagatgctaagaacttgatacaaagacttactttataggtttgcatcattctaccaactccccatctttccaaattaatgtcgtagttaggtcatcgtttaagacatagaatgctttggtagggaaagacgtgttctttaaacgttctttgatactggtatttgtgtgcagcgctgacatataggctctttctcgaaactcatatacttcaaacaacctatcaaacttagtatcttctgtgatttcctcttcaactttgacttcaaaagtgtcgtcagctgatataaattcactaacaagacattttcttccgtcttccgaagaaaaataaacaaagttctcattatcttgattttctgtgtaaaatctctttccttttgttaaatcaggatattcccaagcccattccataagttcggctaacgtcatttctttttttactttaattttcatttttatgtctccttgttatttaattttcttatcatttttacaatcttttctgtccctctaatgtcggctttttcacagttctttaatataaagttaattttgtttttagcatcattaacaatactatttacttctttttctgttggttcagtagggaaaagtaaacctatatctacctgaatttgatttttatttaatgaataaacgctaatttcacatttctcattaaagtcaatatctggtttacttaaactaaacacctcatctacaattgtattgaactcttgtatgggtttaaaataatgttgctctctttgtatcactgccgttgacattagtttatatagtttctgttctttatcaagtatttcttttgtaagtctttcaacttcccatactcttataatacgacaccatgcatcgtaattatttttaatatacttagcttcttctatattagtagtgtaccctattacttctaaggtaggttcttcatcatatataacatatatcttattcatatctatcaaacctttctttaagttaagttaactataacatataatcaatatagggtcaactaatactatacacttttttcagtaagcaaaaaaaaagaacctttttacaggttctttactgggttattaattttttaaatcttggtttccttttattaattttttatcatcaataggatgaccattatataaatattttacttccatatatacatgattatctgtagccgtaagggcatctaagatatcagggtttgtgttaattgcatttgtatcaggaaatgaaaattttcttttatccgactggattgtatctacatgaaatttttcttgttttggtaaagcgtaattaaggtcttctaaattttgtaagaatttagtaagagaaaagggtttaaactttccttgtaaattattatctatataatcatttaatagtcttgtcatttcctctttatttaaagtcattgtttcataatcgttaacatcataaaaaacaacaacattaggttgctcaatacttgtgtctccatctttgtacttagcaatgtaatagcctatttcacctttgtgagctaaataatcttctttcatgatattaaatacttctctagcaataggttttgtatatagttcttcccatttatttgtttctgtgttgtaaaaatgtggtaataagtttgccattctgagttatcctttcttattctgatttaagccatatcttattagtatttttaggcggttcattacttattgtgtatccatcagtacccatatctagtgtgtttacaatgacaggctgagctacagattctttttcactctctaatgttttgaaactaggcacgtctgttttattagattcttgtccatctactaaccaagatactttaaaatcacctttattataagtagtattaggttttaaatctgttaatgttacttttactgtgctacctgtaacttcatcagaagttaaaataagctgttcctctttgttgtagacctttaattttttagtcataatgttatccctttctgttgtgtaatacactaataatatagcatataaaaaacaggtaagggctttcaaaacctttacctgcttattctttactgataatcataccaatcaagaaaatcatctgaacagcttaactctatagttatatcatttataagttcagtagcttcatctttacttaatgactctatatcaaaagttgactcatcatataaacaatctatatgattatagataaaatctttttgtttttctgtagctttgtttaattcattgctttttttacttataaattgactaaagttatcactcatttaaatcttcctctttaataaaggtaccattaactgtttttcctttacgacctttaatttcatcgtaagcaaactctaaacactcttgtaatgacatgtcgtgttgctgagctaaaataattaaagtaactacagtgtccccaataccatctttaagagcttctaggttaccacgtgataatgccgatgctacttcacctgcttcttcgtagaatttaagagcttgtctatcagggttgttattgttcaatcctttatctttactccattcctctacttggctaactaaaccttctagcgtgcggtcttctgtttcaccttcattaaagttaggtttttcatcatttggtacatgttcttcttgttctctatcctctattgtaataaataaagtgtctatttctttttcgtacttatttctctgcatataattatactgcccatactcaggataaggtacatatacagtatcgtctgtaccatcctcataattcaaacaaacacaaacaatatctttgccacttaatctatcatataatgtcatgttgtagggctcatctaagaaaccatgaaactcttcaaagtattcatccttcataccacttacctcaatagaaactttttttgctgatttacttgtatctacttcactatttccatatatcatagttttttcttcactaataccttctagtatcaactctacattttctggttctaataccgcactatctaagttttcaaaaacaatttcaatatttttaatttttttagtcattaataatcattccttttttttagtatatagtaaatataacacataagtaaatagaagtcaataaaaaaaaacacctactttaaaaataagtaggtgtaagatattttagtaggtatcttgtggaaaaaatcctgagaggggactcgaaccccctgactaggtagctacaactagccaataccattactcaggattgctagtaacgctaaatagagtcataacgttaccgtagaccttttctacgcttggtagataggtagaatacaatgattttacagtacccatatagttaggctgttactctcattataaggttaaaaaatgctaactgtgtttcgcattgttaagaggcgttagttaactactataatagtatatcatatattttattgtttgtcaagctctttattccatttacttttttcttttagtaatccttttttaattaattcttcactaatatttttatactctttattttctttgtagaacactttagctaaatatctaccaaaagaatcatctttgtatgtttgaattaaaacatcttttccttctaacatagttgttgtaaattccttagcttcttggtaattattttgtttcttttctggtgtgtcgacacctagtaatcttattctttgctcagaatatgttctcattccgtggtcaatagttacatgtatagtatccccatccactactttgtccacgtgtgctttaaataaatataaattgtcttctatcatcattaaatcccctttttactaatttaaaattatccaatcagtattgcttgatgtacctttagctacatatacagatgagcctactacagcaatctgacctttatataaaggtatattactaatgctttcagttacacctatttggcttatgacttcaaaattagcttttgtggatataaattcccacagtatagagccatctgatataacaccgttattatgagtaggttgtgttccaccacttgtacctgaagctactgctttatatacataactcccattataaacaatttgaccttgtgtgtaatccgtgttagatgtccacttcatattagtagcaactccatcactagtacatctccatttctcaggactacctgatgttagggttctactagtattaacaacaatatctcccaatctccaactccctgtagttggtattgcagtaccgttcagtactttaggtaaattataagctatgttatccttacttataacattaaatgcattactagaaatacttaagtttttattcatattgttatttaatacgaatagattactacaagaaccttgaacacttaatgaatcattacctttatctgtttttatatcattattagtaattgtactatccataacaaaatttaagaacatagctttatccaaagcagtatttgtacttcttaatgtattatttttaaagttaatttctgacacaggtttactagttgttcctgaggcataaataatacttgtttttaaacttgttgtatcttgttttaatacattattttgtatatctatgttattaactcctggataaaggtacaactcgtaaccctcattacctgatacattattgttactaataattcctttactacctcctgtaatagcaataccattagatggtttattacttaactctcctttattactattaccataaattacgttattagtaattgtgtaattagtgccagatatacttaaacctgagtacttattatttgtgtgtatattattacttataataacattttctgttcctgattcaaatccacttgaaccatttcctgtagatatattattaacataatatccatttttagtaccacccataaagttaaaaccattctctaaacattgtgtagctgagcaactatctatagtaatgttgtctgagtaaccataaacaccatctactgcttgcatagtgtttactgcatttacaacattacccatgatattatagccatgtacattatatgctttacagtttctacttcctttaaacgctactccaatagaacgaggtgacgcatatctaaattcacctttactatcccattcccctttaaatgttaatccttctacaagaatgttatcacagttgataaatgagaatcctgtaaacatatctctaccactagaagaaatatcatctatagagtctaaatagtttttagtgattcctgacataataaatgtaggattaccttcacctttaatgtgtatattacttcctgttacttttacacgtgatgggttttgtacagtaggtgtcttagttttgaataaatagtcctctgttcctttaggtactataagagtaccacctttagtacttgttaaataatctaaagctctttggaatctaggatagtcattatcttcatcattaattcttgggtaatcttctatattaactattactttactcttagaattagtgtctttacctagttctttccaatcattaccttttagtacccaaccatatacttgtgttgtaccattgttgtatactttttcatcatatttaaaatcttcaacactagaaggtttaacatgagaataaaaaacatcagttttattcttgctactatcgtttgaagacttaataatattggatggattagttgaacctacaagtaaaccttgcatagttccagatattaaaataacgatagacttaacatcttcactattaacagtaaaagtatctttttgggcgttattgaaagtgaacgctttatatttatcattataataaccatctagtaatattgtatcataattattagatactttgtctaatatattaccgtctttatcaaaacatttaataaatataccactagaattacctataaatgataacttgttaataattagctcgtcaccaacactaacattattaacatataaagccatagggtacgagcctgtaaaggtaagtagtcctttatcatctactaaactaggtgtagtactatagtcataagatactttatctgtcagagaagttgactgtaatggttttctaaatacatttttgactgtgtgatagttaccccctaatcttctatagtctttgctaaaatcattatttttatacaataatgttgttttgtattcgtctactattttagcaatactacttctaggtattttagcagtattaatatttgtaaacgttagtttatgtccattacctaaaacaaattcaggaataaacttaatatctttactatgtgttacataagattttgtcatgtcttgtgtttctaaatctataatagcaaaggtagctttgttattaaattcaaatctgtaattcttaaatataaatcctactgcttttttaagatacaccataacataattttcagatgttggggaagcagtttcaaatttaagtgaatcgaatacattgctatttcctccataggtattagcatttgttagagtttgtttgatgttatagtatgtgttagggtgtttattaaactcagtgccactatatgaaaaagctgatttatagaagtaattactattcatccaagattgctcaccattagaacctataccatctgtatttaattctatatgtgtttcattattaataaagaaattaataatagtattattaaaccaatgacctttaccaccagtagctttatgtttattaccgactgtaaaaccaataatttcattaatattagtattaacatttctacagttaactaattctagtcctatatagttttgactcttaaaaccatgatagcctccaccataagttggataagaactatcatcataaatacctttaattgtaacattagaatatgataaactatctagtttaatagctggtttatccttactaccattataaacaatcttagcatcagatacaatattaatattcttatctattatcaaagtatcatctattttaataggtgattcactagaaggaatgtgtagggtattaccttcacttgtatctttaatagcacgtcttaacctttgaacatccgaagtatcatctttttgctttatatactcgttagagtatacataaggacttttacctgttttaagccaatctgtagctgaacctgtaaaaccgttatttacagctacttcataagaacttaaaccttgcttaccttgttccccttcctcccctttttctcctttaatagacttaacccattcttcttcagaaccgacaaaaccattatctaccgctacatcataagcagatttagcatttacaagtatatggtctttaaaatataatgttatttctttgaatgatgattctagggttgtaaaaccaggaactactactttatcggtttcatatttttcagcttcccatgatacatagaactcaccttgagggtaatgggtatgaggagctaagttaggtatgattacagaccctacttcttcatgtaactctacattgtaacctattgccaatatattaccgtatttatcatatgcttttaaatgaggcattgaaaatctcctttactattagtcaatgttaatatatcataaaacacaaaaaaagggcaaattgccctttagttacagatatcatttagatgaatatggtcttgtactgaatagtctacaatgacatgtgtatgctttttcttttttgttaacactttatatgtgataaagaatgatataatagttaaacatatatttaattttttcataaaatttctcctttaaagaaggtatttaccgtctcagtagttaattctttgcttttaaagatacaagattctgtatttttattcaatatttctaacatattttgcatactacttgctttttgtaaatccgttaagtctataacaactgttatttctgcgttatctattagaatattacctatgtaataatttttaactccgttctccgtagcatgagaggtaacattatgatttaaaacaactataccttttgatggtaagtaatctgaaaagtataggtaacaaaagtatttatgtatcttttttttatcctcttccattactattaccatattctatgaagtttaacaacctttcggtataggttttaattttctctacttcttttctttcatcgtcttttcttcctaatcttgttgtatatttaacaatattaaatagcatgcagtctataaagccagtaatgtagaaatattcttctaaaaatgatataacatcttttttacctttataatggttcggtgtattagtggtagagttgacattatagtataactccagttgttctacatttttcataagctttttagcataatataatgtgtcatctaaagaatgtgtcacatctaaagatgcttcaacaatgtttatctttaattcttttaattctgttgcctctttgttacttccaatttgtgaatcaataaattctctagtatccatattggtgtcctttcgtatctaaaataaaaaccctatctagaatatagatagggaaaaggaaagatattatggaagtgtactataaagtacacatataatataacagttcctttgccttttaatctatatcatttattttaacttcttgtactttaacataatctgataaactattaacgacgatattatcttctactaattcgtttctattatttgtaacatcatatgagtctctataaggtgtttgtactaatgctctaactgtaatgtctatatctacatattctttactatacctttccattactcaacgtagtttcctttagcaagctgatactttttgtgtaattcttcatataatttctccatatctttatattttcgtacatcttcttcaaaatgacttaaatactctattaatgtcttaacttctttaggttctaaagttataactggttttaccattacgcaacatcctcactaaattgtttatttatatttttaatatcttttattaattcgtcttttaattctttaggtaactcatgactttttaaagattgttgttgacctaacgtatatccatattttgttatccttacttctacagtataccatgatttttctaaatcgtcaacttttctagctagtaatattaaacatctgtcatttataatattcgaagcataactgccgacacaatgagatagctgttcaccttctctttttaatttttcagtagtatccgcaggtaaaaatttaactttagagccatcatttaacttatattctttatttgtgatattatttaatttattatcatatttttgttgtaactttaagtcatcgacttcatctttaactgttaaatactcatcagtaacaatatcatgctctagttttaaagaatatggtgttaagttaatactttctttagttctatatccaagaagtactaggtctgaagcaaagtctatataatctctatataaattattaatagcgtatgaatgtatacgttgtctgtttctgacatcatagtttatataattcaccatttttctaaagtcagaaaatgaaaagttaagaacttcttttgtagtacctttaaaagataaagcatttcctattgaatatgaattagtcaccattataaagtcgtcatcgaatagtttgtgtaagttagactcattatataaactaggaaatttatttatgataactcgaagtatattaaggtaattttcttgctcttctttattaagagtaataaacttattatatgtttgtttacttaaatttaaagcttcatgtaatttccatttatttttgtttggtattaatagaaactctttgtgttctttaaatatatcacaattttcgttgttataaattttatcaatattagacacaactaattttaacagattgtttaaattatcagtagcatttttacctttactaactgtgcgataaccatcaggtctatctatcatagagtatacatcaaagttttttacattaagtctacttagatttaagtaataatcattattctttagtgtttggattattatgttaaaagctaaattttcctttccatatttacttaaaataatatttaaaagggcaggtaaagtaatgttattttttagtttatccttattaaaatcatcttcatacatattaaatttaaattctttatgttgtagtgtatttgataggtgtaggtatacatttccatttttattattaaagtcaccgtttactatactccaatctgttgttactatacttatgtcttttaaataacaagtcttaattaaaaacggagtattattatcttttataggtgttaatttgttaagccctatttttatattttttaaaacttcattgtagtattcgtagttattatcataagatttaccaaatgcataagggtcaatattaataccaaatatactataatcacccattaataatacatcaagtatatcattagttgtagtatttatttgtctttttaagtctcttattttttttgtaaggtaattattactattcttattttgcgtattgtcaaactgttttagttcattttcatagtttgcacggcagtatatattattacgatagtgtcttttgttatataaaggaaattcagacctatcgtcactttctatatactcactatatacagtatttacatctgtaactgttttacttaactcttgtacttttttatatgggtctcccttaaacgtagtaagttttttatttccacataatgctataaataaaagtaaatttaaagcgctagaataacaaaaggtattattaatatctcttaataattctttagagccaatatctacaatatttttattatttatttttaaatatactctttcttcacctataaatatactatttctatttactttaggtaatttaagaatttcttcttccgttaatcctgtttctttatattctactgacatgtgtcatcacctcatttattattatataagtatgataacatagttaaatttaatagtcaacaaaaaagaagaacttttttacagttcttctagataagtttcatatttaatttttttagttcttcttacgggtacaatatcgggattactcattaagtctttgtacttcttagaatttttaaagttaatagtattaggcattgctaaaacttcctctaactcatctgtgtacatagtaactttagatattatatctatatcactaatatataaatttttagatttacttttaaaaataatctcatcggtactagttacttctttattagctattaaatccatatagaagtcctttctagtctacataaacaagtatacaatctttgtctgataaagacaccgaggtcatatcattaagttcttgtagttgtttaatagacacatcatatttcttacttatagtccataaggtatcaccatttctaaccttataataaaatttattacctttttgtattaagtctttcattgttatctacgcctttatattcataataagatgcctgtaggtaacatatcataataagaataaagttagctacttctgtatatattacatgtggtgtcgtatttgttattaacatactaataattaaacaagctaatgcaatacctataataagaaataaatatttgctagttccatttgtacttttagttttataaaatttatttatttgggataaataagctacgataatactaatagtagccattatttgtccgtattcaacactatagttagctactgaatagccaatataaataacaattataaacataaccatttctaaaagactaacttctgttgttctaaataagtatataataaaacaaataatacctagtaataaattaatacttactgatataatttgaaataggggtgcatgtgttacaaataagcttgttaagctaatacttactgtaacaacaatataaaaccaaaaatagctatctacacctttaacattcttatcttttatcaaacctactaaagcaggtatatatcctacagtaactaatatagcatataggatgcttaatatatgagctaaattagacattagatgcacctaacttttctaattcccctaaaacttcttcccatgaaataacacctttaccgtctgttaaagataaagctactccgtatacgtaagcgttaaaggaatatggaactctatccatatcatcatgcatatctgttgtgttccatctgatgtcactagagtaaattaaaacaggtttatttagtattttctcgttaatttcaagctctttatctaaaactgttgctacatctgttaattcaccatttacatcaaggtaataaatatcatataagtcatttagcctgtcaatagtaatttgtgcttgtcttttcatttgaaaaatttgacctaactcggtgatggttcctaaacctccattaccgctaataggcaaatcaataacataaatatcagattcctcaatagcacacgtgtcgttttctacaattcgttctgccaacttatgtgagtctgtattctttttatcgttaaatgattgtgagctagggtcaaaaactttaataccaacaatactttccatctcttctttttgtttgattctatattcttttaacccttgcatcaacatatccgatgcatgatacacctgaagttctttcattaaatttgtcattctacttctccttttctttttcaaactcatcttttagtgtgatgatatctttattcagttcttctgagtctttcattttagcccaataataaaaatctctaagttcagggtttcttgttaaaatatattgcttaggtcttacatctcttctttgtgataaggagtaagctatatctctcatatatttccagtctttgtaatagtcagacttatatttaaacataaatcctttcaaatcttcaaatacatacccttcatgcaatatattataagagccattattatccttataccatttataaaattcttcccagctagcaaactccaactctttttcttttagttgtaatcctacttcatcagcaacatatttcaaataatcataatctttctttttcatatttaacgtatttgaaataatatcaagtaagaagatatcgctttttcgatatcttatgatatgagggtcttcttcgatatcaactacttcaaacactaaagtaaaactatcgtcagcaatataatgattttcaaggaatgttgttaatgtctgtatctgtcttttagttaaagttttttctaccagctctttaaataataatgcatatttattcccatgtccacttaaatgtgtttttgatttacttgcatatacaattccttctaacgggtcatagaacattaatcctaaaaatccattttcttttttatatccagttaaagggaattggatagtgtctggcatattctccaatttggtttcttctacttcattgatattaaagaatttattataccttcttcctagtactgtatttctaccttcatcaatatatagacctctagaacttactgtcaactgattccatttctttttagaaaaagctctttttgtaaagttaactgagaacacatctctatattgttgactggttttaatggttttatttccttttcttttatatactatagcaggacaaaacaaatcctctcctatcctatataaaaagtctccttcttaatattcctttcctttattttaattatcaagtactcttaagtcacttttaagaacatccatgctagaggtatgtctgtttataccatctatatttccatcttttaacttattatctttcatgatttcttttttaatttgtttttctgtttttttatttgtcatagtgttttcaatatcaaaagacatctcttcaataataagtgttttaataaaatcaataaattccttaattgtatatctactaaaataatctttatcctcaaagtacgtagcacaaaaacttttacgtcttgttagtacacctattgacttattggaagtagcaatataaacatgatatgtttttccttttacttttattttaaatcttgtattatctaacaaatggttatagtctttaaataagtaattgttcaaaattagccctcctttgcgttaacccaaatttatagtattttattgtagttttctctccgctgtagtaaaggtgtcattattccaaccaccatcacgattaataaactctaaatcacctgtcacagtacataagacatcaaaactaatattttctcttctaccttttgaaatacctgtgtaaactattttaggtatacaactaagggtctgtaatcctaaaccatctatatattctctaaaagatacatgaggtaataaataagcactcaattcactactgatacttctactaaaataaatgataatgtctccaacaggtagttcatcattatacacatctacgatatcatcttcttcaatagtccaagttgtatgttctatatctgcaggtgttacatgaacaagttgtttaacttttccttgtataatagactccttataaaaacctacagcatttgctttttctaaatactgtgcaataaaagtaccgtcatcactaattaaatacggtgttctattttgaaaatctatagattgttccatatctagtttttcgtaggtatcctttaagtactcactaattttattaacatcttttgttttaactttatttgttcctaccttaacttttaattatgtcattattttagtctccttataagtactttctaactggttccgagtaatcattaatatcctttactcttgggtactttaaaatactaaaagcaataatacctagagctacaataggtgctaataatactaatccccagaatgttagcactgtttgcaagaaaaacatcacactatctactaaaaaccatgtagccactacaagtaatgttgttactgtaaataaaaacaacttttcccaaaatccacctttttgaaacttctttgataattttttcatcataatatttctccttatattccaattgctttttttgctaatgcatctacatattcattccatttgttattatcatgagcctttacttttataaaatttatatctataaactttgagtattcccttagcatattaatatatgttttacttaaattgtttttagttttctacgaaccttcataccattgaataagtcctatataatctacatgaataatagcctgcttataacctagttttatagactcttcaataccataacaacaagctagtatttcacctgcaacattattatacttaattaaactactattttcaataggtttactgatttcttttacaatgttctcatttttatctaaaataatagcccctgctccaacaagacctttattataagatgagctaccatctgtatatattaatgcagtcttatgcatatttatgcccttctacaaagcaagggaacatctcacttgtataaatctctttgtagtcttgtaattttatagtagagaaatcaaaaaacttataacaatgttcttctgcttcgatatagtcatctgcaataacattaacttcaaaaccatcaactaaaataacgaacaatttcttaaacatttaaaaaacccctttataatttaataaggtacttaattaaatcaatttcagtgtacttttctgagtgttctagctcttctaatttttcttttacttcttcaagtctgtatgactcttctaaaagttcaaactgctctaataatgtgatactatcaaattcactactattaatgatgttgtgtatatattctagatgtgtgtctttaataatgtttgttaagtcatcaccagtataataatcctcgatatacgataggtctcctaataactcagccgtacttctaataatactatatttagatatattagggtaagattgatataaacaattatctaatttattacttaaatgctctactactttttgcattgtattacctttttcttcagtactatatgaaattctaatattagggtttttagaatcataatcaactaaagaactcctattagtgtttaataacttatctaaagaagttaaaataatagctctatcttctatattatctaaggttaagatattatctataatagtataaaatgctttgtctcctattgctttattaacatcttgaagttcaaaaatattaatcatatcctcaatctcatgacgctcaacaaagttaataatagattttgtaaatttattcatcaacatcaacctctttaaataattctacactattagtatttaaagctttttctaatttcataagattagcactcttaggttttcttttaccactctcccaataagaaataagtgagtagtgaactccaatctcttgtgctaaacttctaactgtatgacctttttcttctcttactttttttaaatttaatactttagtctcttccataataaaccactacctatctttcttcaatttttaaaatactatagttatttttattataagcatacttatttaaaacgtcaagcgttttttctttagcctctactttacctttagctttcatattaacatagaaaacattacttttatttgaacgtgtatgcttaatatatactttgtactgcgtaatctcactttttaatacattacgtttaaaccatttctttaatttttccatttattataaccacctttaaaacttatatatgtattgtagcatatgataaatacattgtcaacttaaaaataaaaaagtactagggaattttccctagtacattatttccagttaatacgaccccaatacttctcttttagcatacgttcccacttgtcagtgattttacatactgccatatagaagttcccagctgacgggtttgtaggatatttaaatctaatccaccaatagccgtctactttaataacttggtcaaagtttacatattgaccactataaataaatgattcagcacctactattgaaccccttaaacctggtgtgcgtcttaccttaatcgttctatcagcagtaaatttacctccccaattccaagttgtttgtacctcgtctttgaaattaggttctataaaccacataggaaagtcgtaaccatgggctctaacggtagctttctcccagccaccgcctccttgagcatctccccaagtccaacctccacctaaccaattattttcaattactataatttggttttggtttgcacttagtacccatgcgacatgaccatgaccgcccccgtatgaattattaaagataaccatagtgcctggtttaggaatgtaggatagtgtattttctactactctagctttatcttttaacatagctttattatcccatggaatgttacatgcacttgctccacctaaagaataacctgggaagagcttgttaaatccatagttagctaagtcgtaacattgcctttttgttacgtttatacctttctatactaatatttctattagtatgtctataatataaactcttatgctttcacataatgagcagactatatcttacccgacaaattcttcgtattttaaattagtgttattttctatattatattgtataataaactctttacgaccatttactgcttcttcaatgcttttatatacacctatatgtttaggttttctattaatacatacatttgcttcatatacattttttttctttctatagtgtattcctgtgtaaccagttttattgaagtacttttttctattgttagcattatcttttggtgttgtccacttgcagttacttggctcataacccttattgttatctactctatctagttgagcatttttaaaaggttttttacccatatctttaatgaaattattgaagtcatcccatcgtttacataccttaatacctctacctccatatctatgatatgcatgataattaggattattgcatctgtatctcatacctttccaaacactatactcattcttatattttattcttccttcatgttttctttttttcttagctatcttttctttatgttctttacttaatttaactatttatatcacctctttagttaaattatatcactaatttaatatacttgtcaagccttactactgcctatcaattgatagtacttagtcgttgaaccttcctctactgttaccatagaggcttggatgcggattatccaatacttaccttttttactgtatcaaacacattactgtttgcccatagctatgttaccatgctatgttagtaggtaagtctctaaggatgtccccgtcaattcagtaagttacgagcccattaagttaagctccataccaaccatcaaagtctattgctttgccttctagactttttaaaaatcgaacaaattcacttctagtcatcgatgctttcaaaagttttcactccttatttccaatctatttttccaaaatatttttctttcttaatacgctcttgtttatctgttatctcacatacagcacaatagaaataatttttactagagcctggtttttgatatttaaatcgaatccaccaatagccgtctactttaataacttggtcaaattcaacccaatcatccttatcgtatagccatgaatctctatttactatagtgcctttaagtcctggagattttctaactttaatagctctatctggataaaaagtacctttccagctccacatagttttagtagattgtgtttttactctaggctcagcattacctgatttctttacatctactgacttaataactttcttgtaatacttagctacttccttatctaagttactagtgtttctacctaatccacatgcttctaataagttacctgggtcttgtttgtcgttttggatgtcttggtgacctggcatatttgttttgtaatcaacaccccagtattcagctaaataagctaagacacgagctccattgtctaatgattttttagaacgttctttatcactaaagtaacaaatttctacaccaatagcaccatcattagcgttaattccgtaccataggtcatccataggagcgttatacaacacatgccaagctttttctgtagtaggaacacatatgatagcttctttatcatctacaaagatatgtgcggatgcagtggaagcccaatcaatgttatatgtatttttgtaataatctacattattttgagctgtagtattaatattccctgtatcatgagctacaataaaaacgggttttttaaccgccatagcttgacctgtgcgtcttgttccaataggcagtaaatcatatctaacatttacacctttccaaatttctatcattactgttcacctacttcttttgggttatcttctttatctaattcagacactaagtctttttctactttaccatgttctaatggttctgcatgacttgtatctatgtcttcattattaactccttcaggagccatcggcatctttgtaggaggtaactctgaggtactattcattgcttcactcttgtatgttaaagctttatctgggtcattataatctctaggtttgttaaagtcctgtacaatagggctatccgctatacctttagtgtcatgacttacaagaacacctaaaccagtcaagaaactaataactacacctgcaattgcagtgccttggtttacaatatcttctgcacctttgattcctagtaaactacatacactaacaataaacgtagctaaaacaggtacaaaacctgtccaaaatgtagcactttttgcttttgcagtaatattgttacctgctattaataatggttttttatctttttttgacataaaaaaataccatcctttctgttattgtaaagctaataataatataacaaaaagaatggttttagttattaaattttaagttattgttcgttaatttgagaaagtgttttgattacttctgacatttgtttattatctaagtcttctaacttagtgtgtggaagtaaatctaatttatcccaaatatcttttttagttgtgaatttttcattaataattgctctaccgattaaactttcagtataataaatttgttttgcagatgccatattagtatctacccttctatagtataattaaacatacatacataaaccgtctcactggtaagtaacatactagacctattgttaagttaatcactacgcttgactctattaggtagctaacctaagtccatctcacgtaacctactaaagcagtacaaccatagggttgagtccgtttaatagtgtaatgtgatactaacatattaattagtaactttcacatggtatgaagaattttaacggcatctttatatttttaccaattattattttgcaggtttatgctactcgtactagtatcgtatgttatcaaacatttttcaatgctccaactgcatgtacttgttaaggtgtatttgtaaaggataccaccaaaaccccctacaaaaattaagcccatcggatactatactttataaacctaatacattactgctaagcattccgattgtaataaacattactattgacgaattaccttaccgacgtataccgataagttttaattcgttcgacaatcttacgccttacaggtaccaccctgtttaaatcagccattatgtatgtatgtttaattatactacatttaaagtataacatattatcattcatttgtcaattaaaaaatgtgttacgttttatagtttttttatactagggtaaaaacgtaataaaagacctagtttcgacaaataaaaataaggagaagaatgtttattatgcaaaatgaaattatagctctttatgagcttatatataatataacatactattttgagtttgtcaagttattttttacttttttatcttgataattcttcttgtactctatcccaatatttttctgattctgttctattatcctcaatgtgagcagtagtacatttacatttgatacagtataaatgctttatatgtccctcttctcttttctgagctctttttcttggtactgtaaaagtattaccacattttgaacaaactaaattactgtggaacattttctgtctttttttcatgattatcaatccttttcttttaatttgttttatatttagattatatcaggtgttgagtattaggtcaacacctttatttaatgtttctagttaatttttaatactcaagctttaagaaacaagatgggtattcttctgatactggagtagtatatttatcttctaagttatctagggctttgaataatttatcaacgtactcaatatcagttactatagtgtcaataatttttgtattatctattgtactttgaggaacgttattacttttcattttctttaatcttcgagtatgttttgatttaatattgagattttgagaatatagcatttctttataaacctgattcgttgattaatgtcacagtccttaattgacctgcgtacctaatttgggtacgtagcttatcttcatcctctgcatggttatttatagcgtttcgataatttgaatatcctaatatcttagctacttcgttacctacaaagtaagtttgattgtctttaactactgttcttactgattctccttcaaaattaaacattaattggttttccatgttacatcagtccttttcttttaattgatactcttattctaacgtaagacttaataaatgtcaatgctttttgttaaattttatgtaattattttgagaaatccttttatatcaagggttttaaagatttttttacctatttggaaaataaggaggattccttatatatataataaataattataaatactaaaataataatactagttataataattaataatatatataggaaagtcaacaaagagtaataaaaaaagtgacttacttaaaagtcactaattttcaaatactaacttaaatgattctatgaataaagggttaatgaatactgtatcagaattaatatcctcagagactctaactctaactgatgcttgtccatgtcctctaattgttccatttatctctctttgtgtatactcaatactatcgtcagagattaaataatatttttttccactaatcattgttacctcagcatgttttaccatatcaaaactcctaactaaatttattgaaaatgaaagttataatagaacctaacactagtaatagtactttctcggtagtatccttctttcttgtgtccttaacaactgtattgttagtgagttcttttatcttttcgtctaatctatctagctgtatgtagatagacgattgtttctcactattaacagctacttctttgtctaaactaactaccatttttcttagttcatcaacttcattttctaattccttatacgtatttttatcaatatagctaccatcttgtattttatcttttatcttatctacttgtcctacaaggttttttagttcttcattcaactaaagtcacctcttaatgtctaacttttcagattctgaatggacgtcatagttttcgaaaaagttattaataatttgcatataatcctcagtaactatctcaccgtatgacgttttagtatttatttcaaacctaagcttaccaaactcatggaggtctatttctttaataacggtattaggattatcagatggtatgtaataataatcaaaatatataatagagccgttgataagcaacctatcaatcctatagacgtggaagaattttctatctcgtctaaagtgagctaaggcatctttaaactctaattttaatatatctttatacttagtcaaatcaacttacccccttataattaattttgagctacactagttttgtgttataatagttattgcagtagcagatataagtattatgtttaataaaattagcaaccaccaaccacctgtacttattaaccataatgaaaaacaagatagtatataaacaaccaccaagtagcctatatatttcataatgtttttacactcttttaatactactacgtatgctagtgatttagataagctaaacagaaaataaaaataaaaaataaaaagaggtatagctataatgcctgctagtataaccactaattacacctaatttcttttagctagataataaaatcttatataatacaactttaatataacattgaaacctgtttgtaaatcaacaatgttacattaatagtgtacggtatattttaaattaggaggactgaactaatagggtgaataataacatagctgtatttatatttaaaactctaataattattatttttattttgtttattttgtctattattaactcactgtcattaatatactctattcgacctagtacagttatgacttactttatattcggtgggatagtttctaatgtggcattaacaataactgataaattattattacacaaagaagaccccttacctgattatattctaaaagaagtagagctaaataacaatgaattacaagtactaaagaaaattgtagagtcacaaactaatgtttctgctgaggaagtaagagtaagagcaaaagcacaacgtcgaatactaaaagataaaaagagagatgctgtcaatgaaaacgaagaaggacattaaagaacaacgtaaagagctgaaagataatgctactgctgtttccttaacaaaaaaaggagataaacgtattgcaagtcctagtagagtgtgttgtttatgtggtcaatctctttcagggatgaattatactaaaggtaaagctatagctaaagttaatcattttcatttacagtactctaagtacttatattttgacatgtgcgcagatattaataactgttacaagaatttaaagaaagtaggtgaattgatagagtgagcgctgaaagtttaagagatatgttatctaagaaaaaaattgaagacgaagataaacgtaaatatatagctgatggatttatgtcaggtattactaaacttatgtatgactttaataaaaagattgacagaggggaaatagaagtaaaagaccctaatgatttgtataaagtgtttgttatcttccaacaaatgcaaaacttaattacagatggttctgatggtggcggtgctataccgcaattatcaagaccacaacaagagctctttgatgaaataacaaatgagaatagtaaaggtgagaaagaagtagatttagagaagttatctcaactatctgctgatgatattactgctatgattattgataaagaaaaggttatgaacgaagagaactcaaatacattctaaagaaaggtgtatatgaatggatggtaaagaattattaaaaataacacaagaaacattcggtacacaaaatgttacgcaagaacaagttgaccatattatcaacatgttaaaccctagtacttatatgctaaaatatcatacgttacgaggtcacccgataacttttagtattccaaacagggacagaagtaaagcacaagctcatagaccataaactagtgctgtggtctttaaactctgttaaacggtcataggaaaataaagaatatcctggtaagaaaagctaagtcctaatggatagagctgataccgtagtaaagaatctacaacatgtagaggaaaaactctaacgactaaatttctaggtagttatctaaatggagatagtgagaactagataagaaaactctttatagagaagtaaagcagagaacccttaaccaaaactaagggctataatatagtctaaacccttaataaatatcgggaaaccgagggtagtagtgggcaagttaagattgtcaacgatagtcaccctaataaagcggtaattaagagtagacaattaggactcagtgagatgtcagtaatggaaatggtacactttgctgacatgtatagttacagaaatgtaaagtgcctctatacgttccctcgattaaacagtgtgggggaattaaaaccttgttaaacgggcatagtaaaataatgtatagaaaaaacaatatactggtaagaaaccctaaatctgactatacacagacagtgggaaccaaccgtgctaactgttgactttatatgtagtgtatgttatactgtatttataaagttagctaaaagcctaacgactaaacttactaataactatataaacggatatagtgaaaatagtataagaaaattttaactaaacatgtaagaaagaaaaggtatattgtaatgactaaaaagaaaacacataaagagtttgttcaagatgtgtataatctagtaggtgacgagtatactgttatatatgccaaagataacaacatatcattgatacgaataccttactattataacatggatgaaatagacaatatactttcgtatttagttaaaaaagtaaagcaaggagctactaaccaaaattagtagctatgatatagtctaatcccctaataaatatcgggaaaccaagggtaaaaaatgacacaagagcagttaaagaaatttgtacagtcacgtcttaatcctgtattagataaaacttattttagagatattgtgaattgggataaagactccttaggctataaacaaattagaaactcaagtttgttttttagaactagtagtaaaccaggttcagttgagggtgttgacatagacttcctcgcaatggacgaatttgagagggtgaactcactagccgaaagttcggctttagagtctatgtcaagttcaccttttaaagtagtaagaagattctcaactccgtcagcacctggggtaggtatacacaaattatatcaacaatctgaccaatggtactatgctcatgtgtgtcaacattgtcaatatgaaaacgaaatgaaatatgctgattatgaccctaattacttaaataagagtggtaatcttttacttttaaacccagatggtattgatgaacaagctaaaacagtacaagaaggtacatatcaatacgtttgtcagaaatgtggaaaacccctagaccgttggtataatggcatttggaaagtaaggtatccagaaagaacaaaaaataattcaggtattagaggttactacatttcacagatgaatgctgtatggataagtgcaagccaattagtagagaaagaaatgaatacagattctaagcaagcattttataactattctttgggttaatggtatagcccctttatatagtaatatatatcgaataaccttgttaaacagggaaaccttaagtgctataaaaagcataaagcaatcctgtgctaaatctataatttaattatttacaagataacattatatggtataattaaattatagtaaatgccgaacgactaaattcctaggtaactatataaatggatatagtgagaactagataaaaactaataacttttaataaaaaaaatgtataaagaaagggagggtgttaaaatggcaattaaaataactacagaagaatttaagaaaaaagtatacgatagagtatcgaatgaatatgaagttttaggagaatatgtaaataataaaacaaaaatacttatgaggcataattctgagacttgtgggaataatgaatacttagtaaagcctaaatcttttttagatggtaacagatgtcctgcctgtaataataaaagaaaaggtaggaaatctaaaactacaaagcaatttaaaaaagaacttcatgatttagtcggtgatgagtattctttaattggtgagtatacaggagtcactaataaagtaaagttaattcataatgtatgtggaaaagaatgggaagtcaaacctaatgattttatatcaaggaaaagcagatgttttcattgtagaatgaaagaacataatttaaaacaaagaagaacccatcaacaatttttagatgaagttaagaaaaaatacggtaatgattatgaagttctatcagagtatattaattctaaatctaaagttttagttagacataaatgtggtttaacatgggaaataagagcttctcatcttatggagagagacatgtgtcctaaatgtaaaatgtctattggagaaaagattgtagaagaatatttgattaataataataatattaaatatgaaatacataaaaagtttgatgatttaatttacaataagtcactttcttatgacttttatttacctgagtatgatacattaatagagtatcaaggaatacaacattatcaaccagtaaaatcttttggtggagagatggcatttaaaaaacaaaaattaagagatgagttaaagagaagttatgcagaagataacggttatttacttcttgaagtagattatggtaaaagaaaatataaagacattgaaaattatttaaataaaaagttattagtgtaaagcaaggagcccttaaccaaaaataagggttatgatatagtctaaaccgattcttaaatgaatgttaaagtattacgaaagtaacggtagtaattgatgccctatgaagatgttaaaatgcgtgttttaccagaagacatctttgacaataagtcagaaattgcaaaaacacagttatttaatagagataaatacaaatttatttcagtaggtatagactggggtaacttccactgggtaactgtacatggtatgactgaggagggtaaagtagatttaatacgtttattctctattaagaaaaacagtagaccagatatggtagaagcagatttagaagctataatattagagatatctaaatatgaccctgatattattgttgcagataatggtgattcgggtaacaacgtacttaaattaattaatttctttggtaaggataaagtatttggttgtacttataagtctagcccacgctcatcaggtcaattatatgcacaatttaatgaaaacagtaatacagtaactgtagataaattaatgcataataaacgatatatacaagatttaaaagctaaacgtataagaatgtaccaacaggtagatgatgaattaaaaacttatcttaagcactggcaaaatgtcctaatcatggacgaagaagatgaaaaaacaggagaactttatcaagttattaaacgtaaaggcgacgaccattattctcagtctgcctgtattggttacatcggtcttactcgtctaaaagaattatatgacaaaggcaacggtacagctttcacatctacttttataccaacggattataatagtacacaaaacaactcgtctaatgagttctattttgatgactaagaaaggactgacgacttgacaagtatattaaattatgatacaatacaagaagatgatataagtaaagagacatttaatttactaattgaagaacctttaactttatcctatgtttctaaatatagtgactttttagatgataaatatgattacatatataaatcactaggctttgataacttcatggactgttatttatacatagcaagagaaccagaacgtatatacaaaggtggagctaaagacataggctcattgaataaagtaaaaagaactgtagtacgtaatgggaaagaaattgaaatgacagtctatgaagataataaaaatgatgataaacctaaagagaataatagtgaagaatcaaaagaacctaaaactgctaaaggttctaaggttcttactcatggtgaagacgataaacctaatcctaaaaagattgccagttctctttctacactaaagaataaaggtgtgaacactgaccacatagatggcaacgcatcagtatacaaagaatttgtagacgataacaataacccaatagggttagcttcttttaaagaaacagattccgacattatattacacgggtatgtatcagacctcgaaactaatggagtaggtgctaggtctattctagagttaatttctttagcaataaagaagaacaagaacgctgttgtttatgatatagaattacctcaagccatagagttcttaaaatctttaggatttattaaatgtaaagatgagtatgtgttaaaaaagaaagatataaagttatttttaggtgagtacagtgagcttatttagcactgtactcatttatacaattatatatataagtattattatattagtagttgtaaatgtagtaataagagagaaaagaatgtacaatactaggaagttgcttatacaagtaaaaaaggatattataaacaacttaaaaaagggagatatgaatgattaaagataataatacaaaaacattggaagagttaattacacctatttctacagaagaaaaagaaaataaagttaaagaatttagtaaaacattatgtgagatgattaataagctatatagttcttacaatgtattaaggcaagaccctattgatgaaacacaaagattagacggttctctaatggtgtttcaaagtagattagatgatacattaacaggtgaggaacaccaaaaactttttaaattagcttttgattataatattgatatttttgaagctaacaagcagtttaaagaagatgtacaaaatggagaagctattaagttaggtgatgttgttgtaaccgacacagctttaagtaatgttttatctagtaatgagcttaatgttagtattacatttatgttaagcaaagactatgaagaaaagaaacgtattgaagaagaagaaaaggaaaaactagataagttataatagatattatgagacctttatggataggtaggaataaataatatgaaacgtaagtttagtagtaatgagattactataacacttataactattgtagttgctctatttatagtattaattacagtagcatttaacaagtaccaaattgctaaagaagataaggacagatatcaaaagctagtagaaatttatcaaaaagcagatgatgatgacggtaaaactaaaaaaaggtatgttgagaagttaaatagggctgaggaagaacttaaaaaggttaaagaagaaactaattataaaggttataatgataaaacagaaaaagaaagagataaagaggataagagtgtaagagaacgtatttatggtaatgataaggataaagatttagtattagtaaataataaggttgttgtaagtaatgaagttactagacctaagataatagaagataatggtgtcagtacagttgtagtacctcctgttgtaagtcctgttgagccaccaagtgaacctagtttaccttctcctagtttaccttctcctagtttaccttctcctactatacctaaacctattattcctaatcctattaaccctaatcctattctacctaaacctaacatccctacccctaacccactaccctctatagaacctgaaaaacctatagaacctgaaaaacctatagaacctgaaaaacctatagaacctgaaaaacctatagaacctgaaaaacctatagaacctgaaaaacctatagaacctgaaaaacctatagaacctgaaaaacctatagaacctgaaaaacctatagaacctgaaaaacctatagaacctgaaaaacctagctcagatactacgatacctttagttccattggaacctagcacacctgtagatgaaagtaatgatactaatggagagggataacctctcctttttttgctatattaaaagagtaataaaataaacattatagttggtgattttttgataggattaaacgtacttacagctatatccgtagtttttgcttgtgtaagtctactagcactaatggtatttgcgtatattaaaactgaaaaaagtagtaagttggttctatacttgatatatgctataatttctataggttcttatgtagtattaacaatgtttcaagccacgtcaatcattataaaaaatgatgttatagactctattgagaatacagagcagtatgtagggtttaataaccctttaattgtttttggtataagtttctttggagctgtaataggcagtttttggtttttagttatgaagattgtaaatactaggaatttaaaaaataaaaaattaaaggattgaagcatttgctattttcaaaagacgataaatgggatgaagcaaaagactttataaaaggtcaaggattagcagataattggatagaagtagtggattattatagacagataggtggtaaacatgtagctatgtttattgctattgataaagttaaatatatggtactagaagctacaaaggataataaagtaatattggtagataaggataataatattgtgttagaggattatgatattgttatggaaagtaagaaaatgttttactatatagaagaaccattcgaagtaaagataaatattcctaaacatatccaagatattacctataataacactgttatactaactactattcgaggaggtaaataaaaagttgcctgatttatttaaaagtctaaggttaggtagtatgtataaagaagacactgaagaccttatggttcctttagatgatggaatacaagctaacattagacaaatagaacaagatacaaaagagatgcaagaaattactaaatctttgtatggtaaacagcaagcttatgcagaaccatttttagaaatgatggatacaaatcctgattatagagataagaagagttatatgagaaatgctcataatttacatgaagtgttaaagaaatttggtaataactctatattaaatgctataattattacaagagctaaccaagtatctacatactgtaaacctgccagatattcagaaaaaggcgtcggttttgaagttaaattaaaagacttagacgctacacctggtattaaagaaaaagagcagatgaaacgtattgaagaatttattcttaatacaggtacagataaagatatagacagggattcattccaagagttttgtaaaaaaatagtaagagatacttacacgtacgaccaagttaacttcgaaaaagtttttagtcctaaaaacaaaactaagatggagaagtttattgcagtagaccctagcacaattttttatgctactgataaaaacggtaagataattaaaggtggcaatcgctttgtacaagtcatagataagcaagtagtagctagttttacaagcagagaacttgtcatgggtattaggaaccctaggtcagacttaaattctagtgggtatggattgtcagaagtagagattgcaatgaaagaatttatagcttacaataataccgaaagttttaatgatagattctttagccacggtggaacaacaagaggtattttacaaattagagcagaccaacagcaatctcaacatgcgttagagaactttaaaagagaatggaagtctagtttttcaggtataaacggtagctggcaaatttgcctctatataaagtaatttatatagatgaagggttaactgctaagaacacctaaagctcaatacactacaaagtaacccgaaagggtaggcttgaatgttacgaaagtagaaaaaagatattgagatacgttaaggttaaatcctaagacgaagaacaatggttgtttagcatcgaaagtcctaaagaactgaaaggtctatggaatacgttcaacgactatcccgttacaagacgggagtaaagctccaagctattgggagaagaaaaatccttaccctacacaatagggataacaaatagtctagtctcgtactgaaaggtagagcatgtgaaatgacacaggtttacaaagtagcgtttgtaaataaataaaactaaggtttataaaaaaaattattcctttactagttgacaagtaatcttttatatgatatacttaaaccgtagagtatataaaagtaactagtaatagtgagggtactcaaaaagggatacgttgaaaaaggaataaaattttttataaattttagattacgaagtccccgtgatgatggctgatgatgttaagtttgttaatatgacaccaacagcaaatgatatgcaatttgaaaaatggctaaatttcttaatcaacattatttctgctttgtatggtatagacccttctgaaataggttttcctaatagaggaggaggtgctacagggtcaaaagggggttctactttaaatgaatcagaccctgctaagaagcaacaacagtctatgaataaaggtttacagcctctattaagatttatagaagaattaattaatagacacattatatctgaatttggtgataagtatactttccaattcgttggaggagatactaagtctgagttagataagcttagtattttacaaaaagaagtacaagtatataaaactgtaaatgaagcaagagaagaacagggattgaaaccaatagatggtggagatgtaattcttgactcagcatttttacaaagtacagcacaagaaatacaaaaagaccaatacctagatactaaacaaaaagaaagacttcaattacttatgagttatacacaaccacaaactgatgagcctacagatgatagtaaacaagaaacaactaaccaagatgtaggaacagataatcagttaaaaggtgatgataacgtatatagaacacaaacatcaaataaaggacaaggaagaaaaggtgagaaatcttccgactttatgtagataatattagcaacctaattaatacttaggttgttattttttaatttggagctacatttatactatgttatactatgtgtgtagtaatgaataatgttgatgatatactttttgttatattatgtatgtacatataaaataacaattaagtgaggtgtataatcactttggaagaaatgaaatttaatgcttttgttcctatggacttaaagaaatccatagatacggaagatgatacaaataaatattctatcgtatctggttgggcttccacaccagctgttgatttgcagaatgacattataaatccaaaaggtattgatatagaatactttaaaaaaaatggatatattaactacgaacatcaacaagataatgtagtaggtatacctacagataactgttatgttgatttagaaaaaggtttatttatagaagctaagctatggaaagatgatgaaaatgttataaaaatgttagacctagctgagaaactagaaaagtcaggtagtggtagacgtttagggttttctatagaaggcgctgttaagaaacgtaacataaatgacaatagaattgttgacgaacttatgattacaggggtagcactagtaaaaaacccagctaatcctgaagctacatgggaaagttttgttaaatcattccttactggaacggaaacaacaccagacacacaagtagatgcaggagccttacgtaaagagtcattagcaagctctattactaatttaacctatgtaacaaaaattaaagatgttaaagagtataatgatatttggaataatgtagtagaggacttaactaaatctaataatatgggttatgaagaatcagttattacattacaattagccaaaggactatcaagaaaagatgctgagatagcagttatgagtattaataaaaaaaatttagaataggggattatattatatgcctacggaattacaaaatattctacaagaatatgataacttagacaaagaagaagtatcaaaatctgtagaagagtctaaagaagaagtaaaagaagataaaacagaagacactaaaacagaagacactaaaacagaagaaaaagaagaaattaaaaatgaagtagaagctacagaagagcaagtagaagaagctaaagaagaaccacaagaacctgcaaaggttactgaagaagatgctaaagaagcacatgaacaagaagaaaatctagaagaagaagtatctaagtcagctaaggagtcgaaagaccctgtagataaaaaagatactaaaacagaagacaaagacaacgagaaacgaaaaaataaaaaagacaaaaaagaagaaaaagatgaagaagaggaagaaaaaacatctaaatctatttctgataaagatattgtagatggtttccgtactatcttgaaatcattccaagatattaaaaaagaaaatgaacaatatgtgactaaatcagatttagaagaagtaactaaatctattcaagctttaactgataaaattaattctaatgaagaagtttctaaatcagttgagagcaaccaagaagataaagaagaagcagtagaaaaatccgtaacgactaataacacttcgaatgaacaagatgtagttggttatgtagctaaatcagtacaaacagaagaacaagcagaaactacagaagataaagaagaacaagaagtagaagttaaagaagaaagtagagacttatctgtagaagcccgtgaaaaattcatgagtacctataaagaaaaatctcaaaacccacatacgaatcgttcagaagtattgaatgcttatcaagcttacttaaatatccgcaacaatccagagcaagcaagtgaaaaagactttaatattgtaaaagaatttgctaatctttaattaagaaacaaagttgtgttatattatagtgtgtaaaataaaacaataaaaaaaaagagcatatatgaaaggtgatatatataaatgaaccaaaatgaactttcaaaaaagcaacatgcagttgctgatgaattacaagaaaaattatcgaaatccttccaaactggatatggtatcactcctgaaacacaagtggatgcaggtgctttacgtcgtgaaattttagacgaccaaatcactatgcttacatggggaaataatgatttagtattttaccgtgatgttgcacgtagaccagctgaatcaacagtaattaaatatgatgttttcttacgtcacggtaaagtaggtcattctcgttttgtacgtgaaatcggagtagcgtcagtttcagaccctaatatccgtcaaaagaccgttacaatgaaatacatttctgatactaaaaatatgtcattggcatctagtttagtaaataacattgctgaccctggtcaaatcttaactgaagatgctatctcagttgttgctaaaacaattgaatgggcttcattctatggtgatgcttcattaacttctgaggttggtggagaaggtttagagttcgatggattagctaaattaattgatgctgataacgttatcgacgctaaaggtgctcacttagatgagaaattattaaacttagcttcagttaaaatcggtaaaggttttggtacagctacagatgcttatatgcctatcggtgtacattctgactttgttactaatattttaggtcgacaaatgcaattaatgcaagacaatagtggtaatgtaaatactggtttcagtgttaacggattctattcatctcgtggattcattagattacatggttctactgtaatggaaaatgaattaatcctagatgagactttaatcccacaaccaaacgcaccacaaccagctacagtaaaagctgaagtaaaaacagaccaaaaaggtaaatttactaaagaagaagaccgtgcaggtttatcttataaagtggttgtacattcggatgaagctgaatcagcaccatcagaagcacaagttgctacagtaacaaatgctacagatggagtagaattaaagattactgttaactctatgtaccaacaaagcccacaattcgtatctatttaccgtcaaggtaaagaaacaggtatgtactacttaattaaacgtgtagcacttaaagatgcacaagaagatggttctttagtattcgttgataaaaacgaaacattacctgaaacagcagacgtattcgttggtgaaatgtcaccacaagtattacacttgttcgagttattaccaatgatgaaattaccattagctcaaattaatgctagtattacatttgcagtattatggtatggtgctttagcgttacgtgctcctaaaaaatgggctcgtattaaaaacgtaagttaccttgcattaaaatagtaaatacaattaaaaattgaatacaatagaataaggagtatacctaagggttgctccttttttattactacttatagtatacacgaaaggaatttaaaaatcaatgttaacttataaattaaaaaatattaaaatggctactgtacatggtcaagtagaagtagatgataaaggcgtagttaaaggactaactgctaaacaagaaaaagattttgctaatttaccaggttttacacatatggaagacaagaaaacaacaaagaaagaagtaaaacctaaggaagaaaaagaagagaagagaccaattaaaaaaacaactaaaaaagaagataagtaggttgatagaatggtaaacagtatgtttggtggtagtttagacccttacgaaagctctttatcatatgagtatccttatcacccatctggaaacccaaaacatatagataaaagagaattagatagtattactctagctgattatggttggtcagcagatgctgtgaaagcctatatgtttggtataacagtacaaaaccccgatacaggacaacctatgggtgatgatttttataatcatatattagaaagagctataggtaaagcggaaagagctttagatatatctattttacctgacttacaacatgaaatgagagattactacgaaacagaatttaatagttatatgtttgtacacgcatataaaaaacctatattacaggtagaaaatttacaactacaatttaatggtagacctatgtatgattatccagctaactggtggaaagtagagcatttagcaggtcacgtacagttattccctacagctttaatgcagacgggtcaatctatgtcttacgatgctgtattcagtggatatcctcaattagcaggaatgtacccaccaagtggagcaacttttgcacctcaaatgattacattagattatattagtggtatgttacctagacaaagagcaggtagaactaaaccatgggaagtaccaccagaattagagcaattagttattaagtatgcactaaaagagatttaccaaatatggggttataatgatgttaccctgtgtgtagcgtaagttgcacatttccaaaggttaaatgctaagaaatcctaaagactcaataactgaaacagaatccgaaaggataaatggaatagttacgaaagtagaaaaaatattgagtatggtgtaaggttaaatcctaagtactgttacaatggaagtttagcagggaaagttctaagggattattaatcctatgaaagaccctcaacgactattccgtataggtgacggaagtaaagccacaagtgattggtggaagaaaaatctttaccctataataatagggataacaaatagtctgcactcgtcttgaaaaagagagctaggaattgacctagatttaatcagtagcgtgattaaataaacaaagttaattaaataataatttccttatgaaggaagttaatttaattaacatatggtaatctcattatcggtgcaggaatagcaaacaaaactctagatgtagatggaattacagaaacaataggtactacacaatctgctatgtatggtggagcaagtgctcaaatactacaaattaatgaagatataaaagagctattagctgggttaaaatcttactttggctccaatatgataggcatatagtaggaaggagatattaaatgcaaaaaccttttatgataggtactaataataatacttctaacataattaataagtctactatgtatacatctacaacacaagcagatgaacaagaacaaaagttatctacagctagactagagtttgacactaaggatatgagaagatttgtcaatgatagaggtataaaggtactgtgggaaagggcttacttttgtccttgccttaaccctgacacaggacatcctagagtagattgtcctaggtgtcacggtaaaggtattgcctatttacctcctaaagagacaataatggctattcaatctcaagaaaaaggaactaacaatttagatataggaattttagatactggtacagctataggaactacacaactagaaaaacgagtatcttatagagacaggtttactgttcctgaagtattgatgccacaacaacttatataccatgttactaaagagcgtatacaaaaaggtatacctctatactatgatgtcaaagaagtaacctttattacatctaacgatggtaatgtttatgaagatgactataatatagagaacaatagattattcatggacgctaagtttgaaaacaaaactatatccttaaatattttaatggtacttagatatgtagtatcagatatattaaaagaaagtcgataccaatatactaaatttaatcaacctaatacaaagtttgaaaatttacctcagaagctattattaaaaagggaagacgttattgtactacctgagccatttaaagttaatgatggtatagaagaggacttagagatacaggtagaagaccctaaaaaagaatctaaagataatcattcaggtggtttctttgggggaatgctataatgcctataaaagcaactagacctaagttatttagagacaagagctataaaaatgtaggtaagagaacagtagatgctatgcgttctgatattttagatagattacaagctacagcattacaagtagataatgtgagtgtcaaacgtatgcctacttatttacaaataactgagaaaaagctagagaagaaaggtgtaatagaccttaagaaagcttttgctcattcatctaaaaagaaaaagactaaagatggtggttggtatctaacggtgcctataagaataaaaacaagtaagatgaataataaaacataccaagacttaaggtctttaaaaatagacagttcaagtaattcagtatctactcttactgattatctagagggtagacgaagtaatattagtcatccatcactaaatactgctagtaaatcaagtagaattactaaagtaagaaatggtaaaaaatctagttactttatgtttagaacagtatctagtaaatcccctgcaagttcatggatattaaatagagataaggttaatgaaaacaacttctctaaaacaacattaaagtatgttagaaatcttatgaactggaagattaagaatttaatgtagaaaggttatggaagtaggatggcaataacatcagtagactcatatttactagagcaaataaagcccagattacatacagtactaagtaattgttatattatagatgaagttttaaaagactttgattatcaaactagggaaatgttcaaagaggctttttgcggtaagaacgcaaagcacgaagtaacagtagggttcaatttccctagctttaaaaacaactacgaagctcattacctaatacaactaggacaaggtcaagaggttaaaaactctttaggtagtatacaagggtcttatctagaagcttcgggtaacacatatagtgaacaatcagtagctaaaagagaaggtaatcgtttagtatttcatgtatctaaacctatttctaatgtaataagagtagaagacatagcgtttgattcttacgatgatgttaaagtatcagataacactgtatcttttaattatactaacaatgagacttatgaaggctacaacgcaaatattgtatatgtagaaaaaacaaatgatagtaaagggttagtaaaaggtattaccatagaagaacaagtaacaattgtgggtatgtcgtataatgtagatgttgctagatgtttagatgccgtattaaaaatgatattgatatctatgagagacagtatagaagaacaacaaacattccagctacaaaatcttgcatttggagatatcgcacctatattccaagacggtgagtcatctatctttggtagacctactataattaaatacacaagttcattagatttagattatacaataacacaagatattaataagattactttcaagaataaaggagcaaaaagataatggctaagaaaacacctaaaggtaaaacctttacaggttatgtacatatagatacatttttaaaaacagcacagaccttgtttaatatgaaagagtcacaggtagcaggttttaaagcctacatggaaggtaaacactacctgttcaatgaaaaagactttattccatttttagaaaagtatttaggtagagaattagaaatttaatatatagataggagaattatacatggcagttgaaccgtttccacgaagacctgtcactcgtccacatgcagtcattaatgtagacagtacaggtatcggtaaatcagctagctccagtgaaaagattttatgtttaattggacaagctgaaggtggtaaacctgataccgtatatgaattaagaaactacgcacaagctaaaagactattccgctcaggtgaattacttgatgcaattgaattagcttggggttctaatccacaatacacagcaggtaagatttttgctatgcgtgtagaggatgctaaaccagctacagctgaagtaggcggattgaaagttacttcacagatttatggtaacgtagctaacaacattcaagtaggattagaaaaaaatacaatcagtaattcattacgtttacatttaatcttccaagatgatagatttaatgaaacatatgataatattggtaatatcttcactatcaaatataaaggtagtgaaagtacagctactttttctgtagagcacgataaagagacacaaaaagcaaaaagattagtattaaaagctaatagcacagaagttaagtcttatgacttaacaggaggagcttacgctactactaatgccatcattaacgatattaaccaattacctgattttgaagctaagttatcaccttttggagataagaacttagagtcttacttattagaccctatgacagatgttaacattaaggataaagctgagtatgtaaaagcagtatttggtgatttagagaaacaaacagcctataacggacttgtttcatttgaacgattagtatctgaacaagcacctaaaaacgtagaagtagacgcacatgaagaatctgctactgtaacagctgtgtccccaattcaagaaatcacaccttttgaattaacaaaactttcaggtggtacaaatggtgaacctcctgctacatgggcggataaaatcgaaaaatttgcacatgaaggtggatactacatggtaccactatcctctaaacaatctgttcatgcagaagtagcttcttttgttaaagaacgttctgatgcaggtgaacctatgcgtgctattctaggtggaggatttaatgaaacgaaagaacaattatttggtcgtcaatcatcattatctagcccacgagttgctttagtagctaactcaggtatattcacaatggacaatggtcgtaagttacatgtaccagcttatatggtagcttctgctatcggaggtttggtaagtggtttagctataggtgagtctattacctttaagcaactacgtattaataatgtagaccaattatatgaatcattagacttagatgagttaaatgaaaacggtattatcaccgtacaatatgttcgtaatagagctaatacattctttagattaacagacgatgttacgacatttaatgataaaaatgaccctgttaagtcagaaatggctgttggggaagcaaatgacttcttatgttctgagttaaaacttgagcttgaaaataactttattggtactcgtactatcaatacaagtgcttcaattatcaaagactttgtacagtcattcttaggacgcaagaaacgagataacgaaattcaagacttcccacctgaagacgtacaagttattgtcgagggtaatgaagctagaatctcaatggttgtataccctatcagaagcttcaagaaaatttctgttagcttggtataccaacaacaaacattaagagcctaaactaggacaaggagtacctagtttaggtactcctattaaatttaataggagagtgaattaatatggcttcagaggctaagcagtctgtccatactggtaataccgttatgctaatggtaaaaggtaaaccagttggaagagcacaatctgctaaaggtcaacgtgaatacggaactactggtgtatacgaaattggtagtattatgccacaagagcatgtttacttaaaatatgctggtacaattacactagaacgtttacgtatgaaaaaagaaaacttcgcagatttaggatatgcttcacttggtgaagaaattcttaagaaagatattattgatatcttagtagtagataacttaacgaaacaagttattattagttaccatggtttaactaaatagaccccttgtacagtgatgtgcattgaataataccttaaattgctagaacaccgtaaagctaactaaactacaaagtaagtcgaaagactaagcttgaatgttgagaaatcagaaaaaattagttagatggtataaggttaaatcctaagtactacataattggtaattagcatccaagctcctgtaaaatggagaaggttcaacgactataataggtaagtcttagttacatattaagattatggcatagtctagccccttaaaatatatcgaaagatagggtataaacggttcagcaaacaactacaacgagagttggaatacgaattgacaataacagttccctctatatagtaatatatagttgaataaaacctgaaattgcggggaaaccttaaagccaattaaactacaacgtaacttgaaaaagtaagcgtgaatgttgagaaatcagaaaaaattagttggatagtatatggtgagataaaagcattaataactaacgacatattattaatgtcctaagtactcaatcaataggaaatccgcaggcaagcctacaaaagtgggaagcttcaacgactataataggtagattccttaatacttaagggtcatggtatagtctaagccctttaaaatatatcgaaagatagggtaatattttactaataatgtaaaattactggaaatagtcacagaagaaattgagtttagttacctttaactaatagaggctatgtttggtgacaagcatagaaaacactttaaattgcgtgaaaatcttaaagactagataactacaacgtaacttgaaagagtaagcgtgaatgttgagaaatcagaaaaaatatctagtatagtataaggttaaaccctaagtacagtaaaatagatgatacgcaggcaagcctacgagagtgggaagcttcaacgactataataagtgagtcttagttacacattaagattatggtatagtctactccctttaaaatatatcgaaagatagggtatagaggacagcatcagataaggctagaacttaaatttcgtattaagacctaacaataaaagttaggtctttttttatacttgttttattagaagtactgtattataattaaaaataaaaggaggtgtactaaatgacaaacaggaaaacaataggtaaagtaagtaattcaagggcaacatggaaaattaaaccaacaacaagaattaaaaaagataaaacaaaatattctagaaaaaataagcataaaggtattgacaattataaataactgtaatactatagttatataaggagatgatgaactgtgaaaactttttattcaggcagaagaacaacaagtaaaaacaggcaagtaaagaagcattataaacaaatgactaatcaagaaataattatatgtaggaacttactaaaagaggcttataataaaaataattactttaagttaacaaatcacttcaaaggtaaatgtaagaaaccagtaaattttaaagcgtttgttcattatatacataataagaacttagatattatagaatataatgaaacattatacaataacaaaatacaacgtagggtagttgttagacacccttatgtagtaaaagtaaataataaattatcttaccaatatttagttatagaagttgaaacaggtgaagttgtaactatgtactataacagagtcacagataaccacaaaacattaaatttaaatgattattatgataaaaatttaaaaataaagtattgacataagtaaatacataatatatactaaggttacattaataaagag

SEQ ID NO: 6 - DNA, 132009 bp, Unknown
  bacteriophage strain capable of infecting bacteria of the genus Staphylococcus
aataagtaatagataaaaaacaataattgctagtacatagataagtagtaggtagtaggtagtgtataagtaatagctaaatagataagtaaataaatactgtataacagtttgaagatatgaataagaagaaagaattattaagtaacttaagtattaataaatattctaatagtaagtaatagatattaagtaataggtaagtaactaaaagaaagtagctaccactatcacttaggttaggtaagaacagttacctagtaatttctttacatcttctagatagataaataagtggatactaagtaatagctagtaagtaattaaaagaaaacaggtacatggtatacctatatactaagtagcaagtagcaagtaagaacagttacctaggaatttctttgcttcccaccttcatagtgtataaatagttaggtatctaactattagacatctaactattagacatctaactatttatttttatatagttttaactactgtgaactatgcttatgtagtattaaactatgctgattatatgctaaactattctaatgtatagttaaactaagctgaagtagtatttactgtgtataaaggtatatttagtattagatgttgtgtatatggtatactataattctgaacattacttatttaatatatatatatagtttgtttatgtggtagtattgacttaattttccctagagtaaaagtttaatatatttagtaatttccgaacaataaagaaattttaactattttacacatatgtgttgacagtatattacttatggtttatactaagtatataaagttaaaggagatgatttattatgaagattaaaagagaagtttcgtttatagaattaatgtatatgtattataaaggtgatataaaaaaaggtcaacactattctactgatagtcagtttattgttgttataactgttgatgatatatcgttttataatgcactgtatcctaataaatctattactattactatacctaatgacactaagtttattgtagaagcggttatagatgcttctactgagttaagtagtatagtagttacttataagcaaggtaacagtgtattaaactcagtatggtatagaagtagtattaatgaagttattgactactatgtcgaaggtaaaaatacatggttattgtctgttagtactgttgtagatgatgagttagttactatatggaaagatggtaacgtattgtgatttggtatatagtaatattcagtatacttatatatgtacagcacttgtattattatgtgtagtactagtatatagaggggttaaataaccgcttcaataaagacttagtaacgaggagttgtattatgagtttatcagatatttatgtacatttaaatcagttaggatataaaatagaagttttaggggacatgagtacattaaaagttaatgactactacatcgaaaatagatgtatagatagtggttttagggttacaggggataatgtatttttatctgtatattatggtgaagacgtagtaagattctttaaacaaaggttattaaagtagtattttgttaagttatacttgagaataattataaaggaggaagtaagttgagtaaagcattggagtttattttacgttatatattttgtttagcaggagtaattttaggtatgtgggtagggaatttaatcataggggaagaggtaattcctattacatgtttaattccttttgtacttgcttttatactctctgtattacatcatatgtctgataggaaggagagataaatatgataggactaacaatgttacttacaatagtagctgtaatggttttgtttatgtatacctttattctagtagaaatggttcagtcaattaagtatgataggtttgataagtggactaatatcgtatcatttacagttatgacggttgtactggtatcaagtatattagctttatttggtatttaggaagcggtttttgtaaggtaagtaatggaaataaaaaccgcttcaataaaaggaggggttagtttatgagtatatttataagtatcgttgctatatttttagctactattggtattgtactaagtataaggtttggtaagaagtattataagcatgtacttgataattatgatagtgttagtgatttagaatcatcttgtgtgtttggtttattatttatgagtatttgtattggtactatttctattgttttgagtttaggttatctaatagttaatttgttacattgttaggtgtatttaggtatatagattagggcatattaagtaagggagtttttagatgttaattttaagttggtttattatcggcatatatcttgcttgtttagttactattacacttttttctattaaagatagggatattattcctgctacactaggtattgtagctcttattatagttattattcttatatctaccaaagtgttaaatatgtagcttaagtgagattaagtaaggaggattataaatgttaagttttattttggtatgtgttgctctaggtatttcagaacttttcttacttactattttaggtgttatcttagtgatatctattaaagatagggatatagtctcagctatatttgctattgtagtttttattataatgagtatacttatatccgcttcagtactacgtatgttaggtatgtaatttaaaaatgattaaataaggagggttatagatggaaaaactacaagtattaaataaggtattagaaaacaggttaggcataaaagcgtttacgtattctcattatagtaagcatgccagtaacggatatatttacagttttcatatgaaaaaagaatcttttacttgtcatattgttgtatatgatgttagttgtgaaggtttagatacatatagagtaaaagtactagacaaagatgataaggtacatgtttcaactttagatactttaatagaaagtatgtatgatatactactatatgaatatgataagtacctaaaagacaaagaacatcaaaatgaaatttactctatgtttgataaacaattagatactatttaagaagaggtttttctctagggaaaagtagtcaaaggtaaaaatagggcttgaacccgcattctatggttgacatttaggtaaaattagatagattttccctagaagaaaagtttaaaaggtaaaaaaggagttggttactatgtcaaaattagctaagttttgtaggaagtatggagaagttactggcataatggagaatattacagattatgagatgtacttaggtaggggttataaagtaaggtgtagagtaggtaatagccttatttatattcttgtatataaagacagtcatatcattgcaggtttgaggaagcggataatatagtacttcctttgagtgatacacttgaggtgggaacaattaaagacttagaggagctagaaggtttgtatactaatatctatacattactagggtatttatatacagaatatgaaaataaagttatgtatgagtatgggaggttagaataatgtataagggagtgctataatgtttaaaaaaagaaaagaaattaaagagtataagaaacaaggttactctgttgagtatataggaagtattttaggtttatttggtattggcgatgttttatactatgtagaaactaataagaaatacttaaagtcaattagcgtaggtaaagatgacaaccaatatgtatatgactttaatgattatgaatatctatcaaaacataagttaaatatcaaagaagaagaactaatgtccaaagctatttctcagttaagtatcgagggtttaaagaattttaacggagttaggcatgtttgggatgtagatgtgataacacaggattttaatatacatcgtaaagatattgatacggttaaacttaacctaagttttgatgaagagggtaacctatattatgaattagaattaggttggattaatatttataaagagtatacaggtgtaaaagactttcttaatacagtagataactatctcaacttcttctataaagatgtagtcactagcggtcttggattaaaacaagtattatataatacttttattggaggagattatgagtttgtagtatctccatataaggttgaagtatataggggagctgagttaattgatgtaaagaaattttactctgatacttatgacatttattactatagttacggcaccaatgtacacatagctttacaaatgattaagtactatctggaatatcctatgaatgaagtataaccacttcaaatattatataaaaggagttcttaatatgagtaacggaaaagtagcgttaattgggagtaaggtattagaagattataatatttatacaatcatagatgagaatcatatatacttaaaagatagtattgatgtggcttttaatgatgggaaggtactacctatatacattgatagtgtattagaacaattaagtaaagataataaaaatttatatttttctgaacaagatatagatattagtaaacttactgatgacgagtattatacagttactaaaaaataaaaggagaatagataatgagtagtaataaaaaaatagcagaaagagttattgagaaatttttagatgagactaataaaggtgtagattttactaatcaagatgaatttaaccgcttcttagataatacagaagacttgtatgaagtatctgaaactcaaagagataagattattaagtgtttacaaaacattgtagttactatatttatggataaggagaaataacaatgaaaacaataaaaagaaaaatagtacaagaaggtatgaacaaagaagaaactatgatggaagacgattctgttgtaatcaaaaaaattcaaaaagtaacaggcggagctattcttcctttagccaatgacaaggaatatgtagtagtgtttagtaaagtagaccctactaaattaattgtatttaatgtggaaagcaatcaaatctatttaagtggctctggtttcgatagtgaactgtcttatgtagacagtaaaagcaaccctattaccttagaaacagttaggttaatcactaatttattataaatactattagaagtggactattgcccgcttctttttttaaaataagtagttgacaagtatgtgagcatggtttatacttagtatataaagattaaaggagttggttattatgaaaacaattacacaagaagaattagataaagtattaaaagaacataaattatggttgaacagttatggcgtagaagggactagagcaaatttaagttacactatgttgagaagtgttaatctaagaggcgctgatttaagaagagctattctctgtaaagctgacttaagtcatgcttacttaacaggggctatcttaagagaagttgatttggatggtgctattttaagtcatattgatttaagtaacgcggatttaacacacgccagcttaaaatatgttgatttaagatacgctgatttaagctatgctattttatcatctacatatttaagtagtgctgatttgagattttcttatttagataatgctattttaaagtttactaatctaagccgagcaagtataacaggagttataggactgaatatttactctatagataatattggaacctttaatggtaaggtaacttatattcctagtttagacactgtatttgcaggatgttgggaaggaaatttagaagagtttttagaaaaaggtttagaaatgaatgaaggaaaagaagcggacaagattaaaaaagcatatgaattttttaaagtgtgtacagattaaaggttattaggctcttaaagattaagttattttataggataaatactactagaaaatgattatcgtttaatatagaactataacgtccctagtttaagggtcttaaatataaaggagggtattagaatgactaaagttgtaagtagaggatatagttttgaagaacaagaagtaagtatgaattataaccaaggacaatgggtgatttatgcaagtagaaaaccttatattactgatattatgaaaaagtaccctgataaggtggaagtattagaacaattagaaaatgaaacacctgtattagtgaaagtagtacttgatgaagatttagttacattaagaaaacccttaactaaagaacaaagagaaaagaaagcagaaattgctagagaaaggtttggtaagtaatgattagtactatttcagtatttttaattgttttattgacagtgatttttgcttatgttgtgttcatactagcttttatcactttctttaaagataaagagtatttagaatctagcatttttctatttttattagttgttatgactttaactattataggaatcacagctagtttgctgggttattaaccattataataaagaactacgttatagttttaagcattagtcatataaaaaggggtttataatatgaataactatataccagtcattacacctcataatgatggaggtgcttctactatagatagtagtaatggtaatcatactgtggaacataaagaacaatgggaaccttgtatgaatgagactgaggctatgtatactgtatttggtattgtattatttgtcataataattatttttgcttttattgttatggctaaacttaaaaagagtaagtagaagcggttaatctatccgcttcttttttgttgactatagataagtaacatgttataatgatatagaggtgatataaatgactaaacaatttaagaataaagaagttaacactgaaactggtgagattagatacgttaatcctatctggagaccttattttgattctacagactatatatcatatgatttaatacaaggtaaagtagaacgtaaagagtttgaagagaagttctttaactttattacagagttccaaagtaacttaaaagacaaatataaagctacttttgctgatattggtagattatctttattaatgacttatgctagttatagagataaggaaaaaggaaaacattatatattaacagataacaataaagatatgactaacaaaagattatgtaaggtttggaaattaaactataatcaggctagaaacattaagaataacatgaagaaaaaaggtttactgggagaagatgatgaagggctatatattactgatgatataatgattagaggtaaagtataccctaaagaaaagaaagagttaaattattatgtagtatttgataaacctattagggatttatataatgctattactgaatatgaagtaagagatagtgcaagtagtattggtttattcttatctttaattccttttatcaaagtatctacaagtaagaaaaagaatacagataaaggttctaataattctttagttatatctgattgggatgaggaaactaaacaatatatacctttaaataaaagtactttagctaaaaagttaaaagtagatattagaacattaaataggtatttaggagaattaaacacaaagtctaaaaagataacagatagatatttactatacgatattaaaccaacagggtataatgaattagataaaacaattatggttgttaatccatattacacatacacgcaaggtactggaagtaaaccatttagcttacttgaaggttggattaaagaagcggaaaaattagaaaataaataggataggttgaacgtataatgataaatagtgttccatataatcaatttgaacaaattttgtaaatatataccttgaattatttatgtaaataactggctcagacgttcaaaaataggtgttttaactggtgagggcaatcaaagtaaatttcttaaaacccttgatactgtaaggtgaaagcgtaattttcataagttttgtacctacctttgttagtggagataatacatcttgaacaaaggtaattaaaacctgtcttatctgaaatgtttacatatttcatctaatccatttactttgccaatttgcaaagtaaacaaaaaaatgagggaacagaactcctgaagaccaaggagttctgttccctcttattaattattaatttaatatatagtaataacaggttatatttattctaattactttacctaacaacctattattaattaaatgattattaatacatacagtatataactataataacccaagattagtattatcgtagcgtagtggacttttataataggttaaaacaagtaagtataatactatgatttaagttgatattcaaaatatataggttgaagcggttaataataactataagtataaatctatgtttttactaagtacctatctacaaattaccttttagtataagccatttaaaccgcttctattaacaagtaagtataataggataaatattacctaaataatattactgttcaaaatagaccttaaaatgactaagtagcaggggctaaatttaccttaagtataaatctacgtttttactaagtagcaggggttgtttttaccttataataaccgcttcaataaacataaaaaaaactaaggtaaatataccctagcttaactatatatattaaaatgtatcataatgtattgttaatgttttaaaccctttatcattctctatttgttctatagccttaataacaactttattctctcttaaccattttgaaatctcatgtgaaccttgttcgtgatatgtttcttcaaatactttaatcatttgttatcaatcccttttatattattttgttaaggtcatttgattaccttaattacattataacagattgatttataaatgcaaccccctttctcaaacttttttaaaaaacgtgtttcttctatacaatagtaaaaacttttcttaaaaaacttacaataacctattgactttatatagaaacttctgtaatataatagacgtagtaaataatatgaaaaggattgataacagatgaatgtaaaacaaattggagatatactaatgaacttattagatatggacggatataaaagcagtaactactatagaaatgacttaaaatattcaacacactataatgttcaatacttagcttatgttgatggtacttatgaaacattagaactatttaaagaaacaaaactatttagcatatcacacacaaacaagctacctattaatattagtgttaaagtagttaatgaacacttatttgtagaaatgaataacatattatacctagtggataataacggtaatataattaaagaaaaaaacttacaataacctattgactttagcactaagatactgtaatatagtagatgtagtaaataatatgaaaaggattgataaacatgaacagatatttagaatacattaaaggtacttacaacagaattaaaacacaaggcacaatatcaaatgactatagactatggtcagatattgatgaatgtgatgacctatactatcatattaataaagcttgtcatagtctttataataaaggtgtaaaagaaattacagtgacagacaaatgcattaaactaacacttgataataataaaacaaaatttattaaaaaagattaaacaaacacttgactttagaaataatatactgtaatataatagatgtaataaaacaaacaaaaaggattgataaattatgaaaacttataaaaatttagaggaattaaaccaagattacacagttgttagaacatataacgaagcttcaagcaaacataatgatttagatgttactgatatctatgtcaatgattggggtttactacagtacggcatttactttaataaatttgacaacgtgtacaatgtagtttcaatgacaacaggaaacaaaaaatacaacattactgctcatgaacttgatagctttatcatggacgagttaaacaaacaattagagttatttattaatgcaggaagattataaagagggctaattataatgattaaatttaaatacaaaggtaagaactaccgttcaacagaaaatactgacgctattgtaactatattaggcggtacgacaataattacattaattgattggtttatcaggttacaagacaatattaatatctttattaaataagggttattagcccttattttttatgcttttaaaccgcttcaatctagtgtaaaattgcccttatttctttaataaaatactttacatctactagattatcatgtaatataatagatgtaaggaacagcaacacattaaaaaaaacttcttaaaaaagttaaagaaaagtgttgacacttactaaaatacatggtaatatataaatataaagaaaacacaataaacgaaaaggattgataaattatgaaaaacacaattaaagaaatggcaaacggaaatactaaattagaaagattattagttttagcaattgaggaagcggttatgacagagcttgttgaatatgatgcattagataaatacaaccacttagaacaacagttattaaacaatgaagcattaacacaagcagaacgtaaaccatctaacattgattatagcacttacgagggagctatattagcacaagacaaagcagaacactttactaacgttatcttaaaccacatgaacaaagaacaatttgaacaaatgattatggatattgaaacactagaatttaatgcagaacaaatgctattctaaggagacattacacatgaacttaactgaaactgatttaataaacctaatggacaacgttaatagccttgaagatatagacaaggctattaacaaaagcattacaacaaaaggcagtgataaagacgcgggaactattaagcattacaacagcttagacgaactaagacaagactatgatatatcaacaatggcaccaagcgctataaaagaattacttaacttataatagtgtaaaacttcccataatatttaactaaaactattgcaattaactgtatatttgatataatgtaattaaggaaaaacaaataaacgaaaaaggattgataaattatgaaactaatgaagcaaatggaacaaacagtaaaacttgaaggaatcgaacttgaattcttattaacagctttttatgaaacaatagaaatagacgtgattgaccatgatgaattaggtaaatacattcatattgttaaccaactaaaagagaataaagctatcacagcattagaacatataccttctaaactagactttacagacgatacaacaataagattagttcataataaagtgtttgagttagcagattatataattgaacatatgagtgttaaagagtttagtaaacacattaaagactatgaacaaattaaagcagaagctatagaaatgatgtaaaacaaattgaaagggaataaactccctttcttttttttattatttattaggattgtatacaataggttaatataaatatattatacgggggcaggggtaaaatgccactaaagtgggtgggtctgacagggctatggggctacctaaggaacctaattagtgagtaatattatataacttattattaaaagtcaacattataaagtatataataataaaaagtcaacatagttttattattattattaaagtaaacatggtaagatttcttttactgttatttaggtgtttaatgtgacatatcatatctatattcaaataattctctatctacttgttcgaaacctttctttttatcttttataatatagttaccatgtaaaactttttcaatacctgaaggtgcattaataaacaggctattgtttccttgtttgtctactgctctaaatgtctgaccttctgtccattgattgatgtcattcttattatagcctgtatattgaatgtattctactatgtcttccatgtctattatgaattttagcataaactctcttactttagcatagtcatctgtaagggtatctaagtctaaaggttttacttttgctatattgcttatactacgttcttttacaggtgtttttgcatattctaccattaaatcaaataactcactatctgtgcctaagcttcgaaaagaatatggttcatttagaaatacccaagcaataggttgttggttttcttttttaataagtattttttctttccttttggtagtattcttatttgctatggtaacagtatagccttattcatatctatcaaacctttctttaagttaagttaactataacatataatcaatatagtgtcaactaatactatacactttttacagtaaacaaaaaaaaaagaacctttttacaggttctttactaggttattaattttttaaatcttgatttccttttattagcttcttatcatcaataggatgaccattgtataaatactttacttccatatatacatgattgtccgtagccgtaagggcatctaagatatcagggtttgtgttaattgcatttgtatcaggaaatgaaaattttcttttatccgactggattgtatctacatgaaatttttcttgttttggtaaagcgtaattaaggtcttctaaattttgtaagaatttagtaagagaaaagggtttaaactttccttgtaaattattatctatataatcatttaatagtcttgtcatttcctctttatttaaagtcattgtttcataatcgttaacatcataaaaaacaacaacattaggttgctcaatacttgtgtctccatctttgtacttagcaatgtaatagcctatttcacctttgtgagctaaataatcttctttcatgatattaaatacttctctagcaataggttttgtatatagttcttcccattcatttgtttctgtgttgtaaaaatgtggtaataagtttgccattatagtttatcctttcttattccgatttaagccatattttgttagtgtctttaggtggttcattgctgattgtgtacccgtcggtacccatatctaatgtgtttacaatgacaggctgagctacagcttctttttcactctctaatgttttgaaactaggcacatctgttttattagattcttgtccatcgactaaccaagagactttaaagtcacctttattataagtagtattaggttttaaatctgttaatgttacttttactgtgctacctgtaacttcatcagaagttaaaataagctgttcctctttgttgtagacctttaattttttagtcataatgttatccctttctgttgtgtaatacactaataatatagcatataaaaaacaggtaagggctttcaaaacctttacctgcttattctttactgataatcataccaatcaagaaaatcatctgaacagcttaactctatagttatatcatttataagttcagtagcttcatctttacttaatgactctatatcaaaagttgactcatcatataaacaatctatatgattatagataaaatctttttgtttttctgtggctttgtttaattcattgctttttttacttataaattgactaaagttatcactcatttaaatcttcctctttaataaaggtaccattaattgttttacctttacgtcctttaatttcaccataagcaaactctaaacactcttgtaatgacatgtcgtgttgctgagctaaaataattaaagtaactacagtgtccccaataccatctttaagagcttctaggttaccacgtgataatgccgatgctacttcacctgcttcttcgtagaatttaagggcttgtctatcaggattgttattgtccaatcctttatctttactccattcctctacttgactaactaaaccatctagcgtgcggtcttctgtttcaccttcattaaagttaggtttttcatcatttggtacatgttcttcttgttctctatcctctattgtaataaataaagtgtctatttctttttcgtacttatttctctgcatataattatactgcccatactcaggataaggtacatgtacagtatcgtctgtaccatcctcataattcaaacaaacacaaacaatatctttgccacttaatctatcatataatgtcatgttgtagggctcatctaagaaaccatgaaactcttcaaagtattcatccttcataccacttacctcaatagaaactttttttgctgatttacttgtatctacttcactatttccatatatcatagttttttcttcactaataccttctagtatcaactctacattttctggttctaacaccgcactatctaagttttcaaaaacaatttcaatatttttaatttttttagtcattaataatcattccttttttttagtatatagtaaatataacacataagtaaatagaagtcaataaaaaaaaacacctactttaaaaataagtaggtgtaagatattttagtaggtatcttgtggaaaaaatcctgagaggggactcgaaccccctgactaggtagctacaactagccaataccattactcaggattgctagtaacgctaaatagagtcataacgttaccgtagaccttttctacgcttggtagataggtagaatataatgattttacagtacccatatagttaggctgttactctcattataaagttaaaaaatgctaactgtgtttcgcattgttaagaggcgttagttaactactactataataatatagcatatattttattgtttgtcaagttctttattccatttacttttttcttttagtaatccttttttaattaattcttcactaatatttttatactctttattttctttgtagaacactttagctaaatatctaccaaaagaatcatctttgtatgtttgaattaaaacatcttttccttctaacatagttgttgtaaattccttagcttcttggtaattattttgtttcttttctggtgtgtcgacacctagtaatcttattctttgctcagagtatgttctcattccgtggtcaatagttacatgtatagtatccccatccactactttgtccacgtgtgctttaaataaatataaattgtcttctgtcatcattaaatcccctttttactaatttaaaattatccaatcagtattgcttgatgtacctttagctacatatacagatgaacctattatagcaatttgacctttgtataaaggtatattactaatgctttcagttacacctatttggcttatgacttcaaaattagcttttgtggatataaattcccacagtatagagccatctgatataacaccgttattatgagtaggttgtgttccaccacttgtacctgaagctactgctttatatacataattcccattataaacaatttgaccttgtgtgtaatccgtgttagatgtccacttcatattagtagcaactccatcactagtacatctccatttctcaggactacctgatgttagggttctactagtattaacaataatatctcccaatctccaactccctgtagttggtattgcagtaccgttcagtactttaggtaaattataagctatgttatccttacttataacattaaatgcattactagaaatacttaagtttttattcatattgttatttaatacgaatagattactacaagaaccttgaacacttaatgaatcattacctttatctgtttttatatcattattagtaattgtactatccataacaaaatttaagaacatagctttatccaaagcagtatttgtacttcttaatgtattatttttaaagttaatttctgacacaggtttactagttgttcctgaggcataaataatacttgtttttaaacttgttgtatcttgttttaatacattattttgtatatctatgttattaactcctggataaaggtacaactcgtaaccctcattacctgatacattattgttactaataattcctttactacctcctgtaatagcaataccattagatggtttattacttaactctcctttattactattaccataaattacgttattagtaattgtgtaattagtgccagatatacttaaacctgagtacttattatttgtgtgtatattattacttataataacattttctgttcctgattcaaatccacttgaaccatttcctgtagatatattattaacataatatccatttttagtaccacccataaagttaaaaccattctctaaacattgtgtagctgagcaactatctatagtaatgttgtctgagtaaccataaacaccatctactgcttgcatagtgtttactgcatttacaacattacccatgatattatagccatgtacattatatgctttacagtttctacttcctttaaacgctactccaatagaacgaggtgacgcatatctaaattcacctttactatcccattcccctttaaatgttaatccttctacaagaatgttatcacagttgataaatgagaatcctgtaaacatatctctaccactagaagaaatatcatctatagagtctaaatagtttttagtgattcctgacataataaatgtaggattaccttcacctttaatgtgtatattacttcctgttacttttacacgtgatgggttttgtacagtaggtgtcttagttttgaataaatagtcctctgttcctttaggtactataagagtaccacctttagtacttattaaataatctaaagctctttggaatctagggtagtcattatcttcatcattaattcttgggtaatcttctatattaactattactttactcttagaattagtgtctttacctagttctttccaatcattaccttttagtacccaaccatatacttgtgttgtaccattgttgtatactttttcatcatatttaaaatcttcaacactagaaggtttaacatgagaataaaaaacatcagttttattcttgctactatcgtttgaagacttaataatattggatggattagttgaatctacaagtaaaccttgcatagttccagatattaaaataacgatagacttaacatcttcactattaacagtaaaagtatctttttgggcgttattgaaagtgaacgctttatatttatcattataataaccatctagtaatattgtatcataattattagatactttgtctaatatattaccgtctttatcaaaacatttaataaatataccactagaattacctataaatgataacttgttaataattagctcgtcaccaacactaacattattaacatataaagccatagggtacgagcctgtaaaggtaagtagtcctttatcatctactaaactaggtgtagtattatagtcataagatacttcatctgtcagagaagttgactgtaatggttttctaaatacatttttgactgtgtgatagttacctcctaatcttctatagtctttgctaaaatcattatttttatacaataacgttgttttgtattcgtctactattttagcaatactacttctaggtattttagcagtattaatatttgtaaacgttagtttatgtccattacctaaaacaaattcaggaataaacttaatatctttactatgtgttaaataagattttgtcatgtcttgtgtttctaaatctataatagcaaaggtagctttgttattaaattcaaatctgtaattcttaaatataaatcctactgctttcttaagatacaccataacataattttcagatgttgtggaagcagtttcaaatttaagtgaatcgaatacattgctatttcctccataggtattaccatttgttagagtttgtttgatgttatagtatgtgttagggtgtttattaaactcagtgccactatatgaaaaagctgatttatagaagtaattactattcatccaagattgctcaccattagaacctataccatctgtatttaattctatatgtgtttcattattaataaagaaattaataatagtattattaaaccagtgacctttaccaccagtagctttatgtttattaccgactgtaaaaccaataatttcattaatattagtattaacatttctacagttaactaattctagtcctatatagttttgactcttaaaaccatgatagcctccaccataagttggataagaactatcatcataaatacctttaattgtaacattagaatatgataaactatctagtttaatagctggtttatccttactaccattataaacaatcttagcatcagatacaatattaatattcttatctattatcaaagtatcatctattttaataggtgattcactagaaggaatgtgtagggtattaccttcacttgtatctttaatagcacgtcttaacctttgaacatccgaagtatcatctttttgctttatatactcattagagtatacataaggacttttacctgttttaagccaatctgtagctgaacctgtaaaaccgttacttacagctacttcataagcacttaaaccttgcttaccttgttccccttcctcccctttttctcctttaatagacttaacccattcttcttcagaaccgacaaaaccattatctaccgctacatcataagcagatttagcatttacaagtatatggtctttaaaatataatgttatttctttgaatgatgattctagggttgtaaaaccaggaactactactttatcggtttcatatttttcagcttcccatgatacatagaactcaccttgagggtaatgggtatgaggagctaagttaggtatgattacagaccctacttcttcatgtaactctacattgtaacctattgccaatatattaccgtatttatcatatgcttttaaatgaggcattgaaaatctcctttactattagtcaatgttaatatatcataaaacacaaaaaagggcaaattgccctttagttacagatatcatttagatgaatatggtcttgtactgaatagtctacaatgacatgtgtatgctttttcttttttgttaacactttatatgtgataaagaatgatataatagttaaacatatatttaattttttcataaaatttctcctttaaagaaggtatttaccgtctcagtagttaattctttgcttttaaagatacaagattctgtatttttattcaatatttctaacatattttgcatactacttgctttttgtaaatccgttaagtctataacaactgttatttctgcgttatctattagaatattacctatgtaataatttttaactccgttctccgtagcatgagaggtaacattatgatttaaaacaactataccttttgatggtaagtaatctgagaagtataagtaacaaaagtatttgtgtatcttttttttattctcttccattactattaccatattctatgaagtttaacagcctttcggtataggttttaattttctctacttcttttctttcatcgtcttttcttcctaatcttgttgtatatttaacaatattaaatagcatgcagtctataaagccaataatgtagaaatattcttctaaaaatgatataacatcttttttacctttataatggtttggtgtattagtggtagaattgacattatagtataactctagttgttctacatttctcataagctttttagcataatataatgtgtcatctaaagaatgtgtcacatctaaagatgattcaataatgtttatctttagttcttttaattctgttgcctctttgttacttccaatttgtgagtcaataaattctctagtatccatattggtgtcctttcgtatctaaaataaaaaccctatctagaatatagatagggaaaaggaaagatattatggaagtgtactataaagtacacatataatataacagttcctttgccttttaatctatatcatttattttaacttcttgtactttaacataatctgataaactattaacgacgatattatcttctactaattcgtttctattatttgtaacatcatataagtctctataaggtgtttgtactaatgctctaactgtaatgtctatatctacatattctttactatacctttccattactcaacgtagtttcctttagcaagctgatactttttgtgtaattcttcatataactctctcataccttcgtagcttcccatatcgtcctctaagaaactaagataatctaataataattttgtatcttctacttctaacgttataactggttttaccattacgcaacatcctcactaaattgtttatttatatttttaatatcttttattaattcgtcttttaattctttaggtaactcatgactttttaaagattgttgttgacctaacgtatatccatattttgttatccttacttctacagtataccatgatttttctaaatcgtcaacttttctagctagtaaaattaaacatctgtcatttataatattcgaagcataactgccgacacaatgagatagctgttcaccttctctttttaatttttcagtagtatccgcaggtaaaaatttaactttagagccatcgtttaacttatattctttatttgtgatattatctaatttattgttatatttttgttgtagctttaagtcatctacttcatccttaacggttaagtactcatcagtaacaatatcatgctctagttttaaagaatatggtgttaagttaatactttctttagttctatatccaagaagtactaggtctgaagcaaagtctatataatctctatataaattattaatagcgtatgaatgtatacgttgtctgtttctgacatcatagtttatataattcaccatttttctaaagtcagaaaatgaaaagttaagaacttcttttgtagtacctttaaaagataaagcatttcctattgaatatgaattagtcaccattataaagtcgtcatcgaatagtttgtgtaagttagactcattatataaactaggaaatttatttatgataactcgaagtatattaaggtaattttcttgctcttctttattaagagtaataaacttattatatgtttgtttacttaaatttaaagcttcatgtaatttccatttatttttgtttggtattaatagaaactctttgtgttctttaaatatatcacaattttcgttgttataaattttatcaatattagacacaactaattttaacagattgtttaaattatcagtagcatttttacctttactaactgtgcgataaccatcaggtctatctatcatagagtatacatcaaagttttttacattaagtctacttagatttaagtaataatcattattctttagtgtttggattattatgttaaaagctaaattttcctttccatatttacttaaaataatatttaaaagggcaggtaaagtaatgttattttttaatttatccttattaaaatcatcttcatacatattaaatttaaattctttatgttgtagtgtatttgataggtgtaagtatacatttccatttttattattaaagtcactgtttactatattccagtctgttgttactatacctatgtcttttaaatagcaagtcttaattaaaaagagagtgttattatcttttacaggtgttaatttgttaagcgccatttttatattttttaaaacttcattgtagtattcgtagttattatcgtaagatttaccaaatgcataagggtcaatattaataccaaatatactatagtcacccattaataatacatcaaggatatcattagttgtattacttatttgtctttttaagtctcttattttttttgtaaggtaattattactattcttattttgtgtattgtcaaactgttttagttcattttcatagtttacacggcagtatatattattacgatagtatcttttgttatataaaggaaattcagacctatcgtcactttctatatactcactatatacagtatttatgtctgtgacggttttacttaattcttgtacttttttatatgggtcaccattaaatttagtaagttttttatttccacataatgctataaataaaagtaaatttaaagcgctacaatagcaaaaagtattattaatatctcttagaagttctttagaaccagtatctacaatatttttattatttatttttaaatatactctttcttcacctataaatatactatttctatttactttaggtaatttaagaatttcttcttccgttaatcctgtttctttatattctactgacatgtgtcatcacctcatttattattatataagtatgataacatagttaaatttaatagtcaacaaaaaagaagaacttttttacagttcttctagataagtttcatatttaatttttttagttcttcttacgggtacaatatcgggattactcattaagtctttgtacttcttagaatttttaaagttaatagtattaggcattgctaaaacttcctctaactcatctgtgtacatagtaactttagatattatatctatatcactaatatataaatttttagatttacttttaaaaataatctcatcggtactagttacttctttattagctattaaatccatatagaagtcctttctagtctacataaacaagtatacaatctttgtctgataaagacaccgaggtcatatcattaagttcttgtagttgtttaatagacacatcatatttcttacttatagtccataaggtatcaccatttctaaccttataataaaatttattacctttttgtattaagtctttcattgttatctacgcctttatattcataataagatgcctgtaggtaacatatcataataagaataaagttagctacttctgtatatattacatgtggtgtcgtatttgttattaacatactaataattaaacaagctaatgcaatacctataataagaaataaatatttgctagttccatttgtacttttagttttataaaatttatttatttgggataaataagctacgataatactaatagtagccattatttgtccgtattcaacactatagttagctactgaatagccaatataaataacaattataaacataaccatttctaaaagactaacttctgttgttctaaataagtatataataaaacaaataatacctagtaataaattaatacttactgatataatttgaaataggggtgcatgtgttacaaataagcttgttaagctaatacttactgtaacaacaatataaaaccaaaaatagctatctacacctttaacattcttatcttttatcaaacctactaaagcaggtatatatcctacagtaactaatatagcatataggatgcttaatatatgagctaaattagacattagatgcacctaacttttctaattcccctaaaacttcttcccatgaaataacacctttaccgtctgttaaagataaagctactccgtatacgtaagcgttaaaggaatatggaactctatccatatcatcatgcatatctgttgtgttccatctgatgtcactagagtaaattaaaacaggtttatttagtattttctcgttaatttcaagctctttatctaaaactgttgctacatctgttaattcaccatttacatcaaggtaataaatatcatataagtcgtttagcctgtcaatagtaatttgtgcttgtcttttcatttgaaaaatttgacctaactcggtgatggttcctaaacctccattaccgctaataggcaaatcaataacataaatatcagattcctcaatagcacacgtgtcgttttctacaattcgttctgccaacttatgtgagtctgtattctttttatcgttaaatgattgtgagctagggtcaaaaactttaataccaacaatactttccatctcttctttttgtttgattctatattcttttaacccttgcatcaacatatccgatgcatgatacacctgaagttctttcattaaatttgccattctacttctccttttctttttcaaactcatctcttagtgtgataatatctttatcaagttcatctgaatctttcattttagcccaataataaaaatctctaagttcagggttttttgctaaaatatattgcttaggtcttacatctcttctttgtgataaggaataagctatatctctcatatatttccagtctttgtaatagtcagtcttatatttaaacataaatcctttcaaatcttcaaatacatatccttcatgtaatatattataagagccattattatccttataccatttataaaattcttcccaactagcaaactccaactctttttcttttagttgtagtcctgcttcatcagcaacatatttcaaataatcgtaatctttctttttcatatttaacgtatttgaaataatatcaagtaagaagatatcgctttcttgatactttatgatatgtgggtcttcttcaatatcaactacctcgaacactagggtaaaactatcgtcagcaatataatggttttcaaggaatgttgctagtatttgtatttgtcttttggttaaagttttttctactaactctttaaatagtagcgcatatttatttccatgtccacttaaatgggttttagatttacttgcatatacaattccttctaacgggtcatagaacattagtcctaaaaatccattttcttttttatatccagttaaagggaattggatagtgtctggcatattctccaatttggtttcttctacttcattgatattaaagaatttattataccctcttcctaatactgtatttctaccttcatcaatataaagacctctagaactcactgttaactgattccatttctttttagaaaaagctcttttagtaaaattgactgaaaacacatctctatattgctggttgacttttatagtcttattttcttttctggctatatctaggtattgattaggggttaggtctttgtcaatactatcgttccgtctgtttgataaaagaaatttagggtcgtagatagtgttttttatttcatgcttctcaatactgttgtttttatttatcgttatagctcttaagcaaccacctttttctacacgaccttctaaattaactgaatttttagtagcatctaaaggttctctatataaattcctatgtccatgtatttgtattgtattagaatgttcccattggtcatcaacattaaaatcatatcccccgattccattaataagctgacttgttgaaatcttatttaaattatcaagaacttcaggaaggactccgccatgactaacaatgtagtcttgacctttaaaactaaagtaagccacctgctgtaactttctaagaatagactttactctattttgagttattccgttctctatgaaggatttcaaggtaggtataaatcctcttgcatgaaatatttttaaagcttgtttataaaaatctttttcactaatatctacccaactataggctaaacaaatattatcatagtcttctttttctaactgagtatatctgcgaaggtgtctttcatgatttccttctaatagaatgacgttttttaatttataaataatctcaagatactcaaacatttgcttcgattctaatcctctatcaaaataatctccgacaaatatgaagagttcattttgattatctataatgtaatcagtagggaaaagagaatgaagggctgtaaaacaagaatggacatctccaattacatgaattttctcatatgaatcagtattcatgagatttttgtcccacttaatagtatttaacaaatcatttttatctacttcttttgcaaaacttgggatattctcatgttttaaacgctcatagatattttcaataacatccacaggaactttctttagttcttgtctattattattacgttcaaaaagagtgtctagctctgcttctatgttaaccacatatactctatatccttatttttttgataacttctcatattttttaattagtttagccgtagaatgtgtagcatctattacagtaaactctccattttccatacgcttttctaatatgttaaataataaatcccataccttgttgtcttcttcttgtgatattctaaggtttccttctgtatcatatacaggtgcgctgtattgcgttctaaggatatcagggctaagagaatatccctctaatccattttcttttatatacgttgttttacctgagcctggagcacctctcattagtattagttgtctcatatttcattctccttgagtgattttatatgttattgcttatacatcatttttccttttcttttatatactatagcaggacaaaacaaatcctctcctatcctatataaaaagtctccttcttaatattcctttcctttattttaattatcaagtactcttaagtcacttttaagaacatccatgctagaggtatgtctatttataccatctagatttccatcttttaacttattatctttcatgatttcttttttaatttgtttttctgtttttttatttgtcatagtgttttcaatatcaaaagacatctcttcaataataagtgttttaataaaatcaataaattccttaattgtatatctactaaaataatctttatcctcaaagtacgtagcacaaaaacttttacgtcttgttagtacacctattgacttattggaagtagcaatataaacatgatatgtttttccttttacttttattttaaatcttgtattatctaacaaatggttatagtatttaaataagtaattgttcaaaattagccctcctttgcgttaacccaaatttatagtattttattgtagttttctctccgctgtagtaaaggtgtcattattccaaccaccatcacgattaataaactctaaatcacctgtcacagtacataagacatcaaaactaatattttctcttctaccttttgaaatacctgtgtaaactactctagatagggaaatgctatccattatccctaaaccatctatgtagtctctaaaagatacatgaggtattagatatgcatctaattcactactgtacttctcgttatgataaataataatatctccaacaggaaattcatcgttatataagtctacaatatcatcttcttcaatagtccacgttgtatgttctatatctgcaggtgttacatgaacaagttgtttaacttttccttgtataatagactccttataaaaacctacagcatttgctttttctaaatactgtgcaataaaagtaccatcatcactaattaaatacggtgttctattttgaaaatctatagattgttccatatctagtttttcgtaggtatcctttaagtactcactaattttattaacatcttttgttttaactttatttgttcctaccttaacttttaattctgtcattattttagtctccttataagtactttctaactggttccgagtaatcattaatatcctttactcttggatactttaaaatactaaaagcaataatacctagagctacaataggtgctaataaaaccaagccccagaatgttaatactgtttgtaagaaaaacattacactatctactaaaaaccatgtagctactactagtaatgttgtaactgtaaataaaaataacttttcccaaaatccacctttttgaaacttttttgataattttttcatcataatatttctccttatattccaattgctttttttgctaatgcatctacatattcattccatttgttattatcatgagcctttatttttataaaatttatatctataaactttgagtattcccttagcatattaatatatgttttacttaaattgtttttagttttccacgaaccttcataccattgaataagtcctatataatctacatgaataatagcctgcttataacctagttttatagcctcttcaataccataacaacaagctagtatttcacctgcaacattattatacttaattaaactactattttcaataggtttactgatttcttttacaatgttctcatttttatctaaaataatagctcctgctccaacaagacttttattataagatgagctaccatctgtatatattaatgcagtcttatgcagtcttatgcatatttatgcccttctacaaagcaagggaacatctcacttgtataaatctctttgtagtcttgtaattttatagtagagaaatcaaaaaacttataacaatgttcttctgcttcgatatagtcatctgcaataacattaacttcaaaaccatcaactaaaataacgaacaatttcttaaacatttaaaaaacccctttataatttaataaggtacttaattaaatcaatttcagtgtacttttctgagtgttctagctcttctaatttttcttttacttcttcaagtctgtatgactcttctaaaagttcaaactgctctaataatgtgatactatcaaattcactactattaatgatgttgtgtatacattctagatgtgtgtctttaataatgtttgttaagtcatcaccagtataataatcctcgatatacgataggtctcctaataactcagccgtacttctaataatactatatttagatatattagggtaagattgatataaacaattatctaatttattacttaaatgctctactactttttgcattgtattacctttttcttcagtactatatgaaattctaatattagggtttttagaatcataatcaactaaagaactcctattagtgtttaataacttatctaaagaagttaaaataatagctctatcttctatattatctaaggttaagatagtatctataatagtataaaatgctttgtctcctattgctttattaacatcttgaagttcaaaaatattaatcatatcctcaatctcatgacgctcaacaaagttaataatagattttgtaaatttattcatcaacatcaacctctttaaataattctacactattagtatttaaagctttttctaatttcataagattagcactcttaggttttcttttaccactctcccaataagaaataagtgagtagtgaactccaatctcttgtgctaaacttctaactgtatgacctttttcttctcttactttttttaaatttaatactttagtctcttccataataaaccactacctatctttcttcaatttttaaaatactatagttatttttattataagcatacttatttaaaacgtcaagcgttttttctttagcctctactttacctttagctttcatattaacatagaaaacattacttttatttgaacgtgtgtgcttaatatatactttgtactgcgtaacctcactttttaatacattacgtttaaaccatttctttaatttttccatttattataaccacctttaaaacttatatatgtattgtagcatatgataaatacattgtcaacttaaaaataaaaaaatactagggaaaattccctagtacattatttccagttaatacgaccccaatacttctcttttagcatacgttcccacttgtcagtgattttacatactgccatatagaagttcccggctgacgggtttgtaggatatttaaatctaatccaccagtagccgtctgctttaataacttggtcaaagtttacatattgaccactataaataaatgattcagcacctactattgaaccccttaaacctggtgtgcgtcttaccttaatcgttctatcagcagtaaatttacctccccaattccaagttgtttgtacctcgtctttgaaattaggttctataaaccacataggaaagtcgtaaccatgggctctaacggtagctttctcccagccaccgcctccttgagcatctccccaagtccaacctccacctaaccaattattttcaattactataatttggttttggtttgcacttagtacccatgcgacatggccatgaccgcacccgtatgaattattaaagataaccatagtgcctggtttaggaatgtaggatagtgtattttctactactctagctttatcttttaacatagctttattatcccatggaatgttacatgcactctctccacctaaagaataacctgggaagagcttgttaaatccatagttagctaagtcgtaacattgcctttttgttacgtttatacctttctatactaatatttctattagtatgtctataatataaactcttatgctttcacataatgagcagactatatcttacccgacaaattcttcgtattttaaattagtgttattttctatattatattgtataataaactctttacgaccatttactgcttcttcaatgcttttatatacacctatatgtttaggttttctattaatacatacatttgcttcatatacattttttttctttctatagtgtattcctgtgtaaccagttttattgaagtacttttttctattgttagcattatcttttggtgttgtccacttgcagttacttggctcataacccttattgttatctactctatctagttgagcatttttaaaaggttttttacccatatctttaatgaaattattgaagtcatcccatcgtttacataccttaatacctctacctccatatctatgatatgcatgataattaggattattgcatctgtatctcatacctttccaaacactatactcattcttatattttattcttccttcatgttttctttttttcttagctatcttttctttatgttctttacttaatttaactatttatatcacctctttagttaaattatatcactaatttaatatacttgtcaagccttactactgcctatcaattgatagtacttagtcgttgaaccttcctctactgttaccatagaggcttggatgcggattatccaatacttaccttttttactgtatcaaacacattactgtttgcccatagctatgttaccatgctatgttagtaggtaagtctctaaggatgtccccgtcaattcagtaagttacgagcccattaagttaagctccataccaaccatcaaagtctattgctttgccttctagactttttaaaaatcgaacaaattcacttctagtcatcgatgctttcaaaagttttcactccttatttccaatctatttttccaaaatatttttctttcttaatacgctcttgtttatctgttatctcacatacagcacaatagaaataatttttactagagcctggttttggatatttaaatcgaatccaccaatagccgtctactttaataacttggtcaaattcaacccaatcatccttatcgtatagccatgaatctctatttactatagtgcctttaagtcctggagattttctaactttaatagctctatctggataaaaagtacctttccagctccacatagttttagtagattgtgtttttactctaggctcagcattacctgatttctttacatctactgacttaataactttcttgtaatacttagctacttccttatctaagttactagtgtttctacctaatccacatgcttctaataagttacctgggtcttgtttgtcgttttggatgtcttggtgacctggcatatttgttttgtaatcaacaccccagtattcagctaaataagctaagacacgagctccattgtctaatgattttttagaacgttctttatcactaaagtaacaaatttctacaccaatagcaccatcattagcgttaattccgtaccataggtcatccataggagcgttatacaacacatgccaagctttttctgtagtaggaacacatatgatagcttctttatcatctacaaagatatgtgcggatgcagtggaagcccaatcaatgttatatgtatttttgtaataatctacattattttgagctgtagtattaatattccctgtatcatgagctacaataaaaacgggttttttaaccgccatagcttgacctgtgcgtcttgttccaataggtagtaaatcatatctaacacttacacctttccaaatttctatcattactgttcacctacttcttttgggttatcttctttatctaattcagacactaagtctttttctactttaccatgttctaatggttctgcatgacttgtatctatgtcttcattattaactccttcaggagccatcggcatctttgtaggaggtaactctgaggtactattcattgcttcactcttgtatgttaaagctttatctgggtcattataatctctaggtttgttaaagtcctgtacaatagggctatccgctatacctttagtgtcatgacttacaagaacacctaaaccagtcaagaaactaataactacacctgcaattgcagtgccttggtttacaatatcttctgcacctttgattcctaataaactacatacactgacaataaacgtagctaaaacaggtacaaaacctgtccaaaatgtagcgctttttgcttttgcagtaatattgttacccgctattaataatcgttttttatctttttttggcataaaaaataccatcctttctgttattgtaaagctaataataatataacaaaaagaatggttttagttattaaattttaagttattgttcgttaatttgagacagtgttttgattacttctgacatttgtttattatctaagtcttctaacttagtgtgtggaagtaaatctaatttatcccaaatatcttttttagttgtgaatttttcattaataattgctctaccgattaaactttcggtataataaatttgttttgcagatgccatattagtatctacccttctatagtataattaaacatacatacataaaccgtctcactggtaagtaacatactagacctattgttaagttaatcactacgcttgactctattaggtagctaacctaagtccatctcacgtaacctactaaagcagtacaaccatagggttgagtccgtttaatagtgtaatgtgatactaacatattaattagtaactttcacatggtatgaagaattttagcggtattctataatttgaccaattattattttgcaggtttatgctactcgtactagtatcgtatgttatcaaacatttttcaatgctccaactgcatgtacttgttaaggtgtatttgtaaaggataccaccaaaaccctttacaaaaattaagcccatcagatactatactttataaacctaatatgttactgctaagcattccgattgtaataaacattactattgacgaattaccttaccgacgtataccgataagttttaattcgttcgacaatcttacgccttacaggtaccaccctgtttaaatcagccattatgtatgtatgtttaattatactacatttaaagtataacatattatcattcatttgtcaattaaaaaatgtgttacgttttatagtttttttatactagggtaaaaacgtaataaaagacctagtttcgacaaataaaaataaggagaagaatgtttattatgcaaaatgaaattatagctctttatgagcttatatataatataacatactattttgagtttgtcaagttattttttacttttttatcttgataattcttcttgtactctatcccaatatttttctgattctgttctattatcctcaatgtgagcagtagtacatttacatttgatacagtataaatgctttatatgtccctcttctcttttctgagctctttttcttggtactgtaaaagtattaccacattttgaacaaactaaattactgtggaacattttctgtctttttttcatgattatcaatccttttcttttaatttgttttatatttagattatatcaggtgttgagtattaggtcaacacctttatttaatgtttctagttaatttttaatactcaagctttaagaaacaagatgggtattcttctgatactggagtagtatatttatcttctaagttatctagggctttgaataatttatcaacgtactcaatatcagttactatagtgtcaataatttttgtattatctattgtactttgaggaacgttattacttttcattttctttaatcttcgagtatgttttgatttaatattgagattttgagaatatagcatttctttataaacctgattcgttgattaatgtcacagtccttaattgacctgcgtacctaatttgggtacgtagcttatcttcatcctctgcatggttatttatagcgtttcgataatttgaatatcctaatatcttagctacttcgttacctaaaaagtaagtttgattgtctttaactactgttcttactgattctccttcaaaattaaacattaattggttttccatgttacatcagtccttttcttttaattgatactcttattctaacgtaagacttaataaatgtcaatgctttttgttaaattttatgtaattattttgagaaatccttttatatcaagggttttaaagatttttttacctatttggaaaataaggaggattccttatatatataataaataattataaatactaaaataataatactagttataataattaataatatatatataggaaagtcaacaaagagtaataaaaaaagtgacttacttaaaagtcactaattttcaaatactaacttaaatgattctatgaataaagggttaatgaatactgtatcagaattaatatcctcagagactctaactctaactgatgcttgtccatgtcctctaattgttccatttatctctctttgtgtatactcaatactatcgtcagagattaaataatatttttttccactaatcattgttacctcagcatgttttaccatatcaaaactcctaactaaatttattgaaaatgaaagttataatagaacctaacactagtaatagtactttctcggtagtatccttctttcttgtgtccttaacaactgtattgttagtgagttcttttatcttttcgtctaatctatctagctgtacgtagatagacgattgtttctcactattaacagctacttctttgtctaaattaactaccatttttcttagttcatcaacttcattttctaattccttatacgtatttttatcaatatagctaccatcttgtactttatcttttatcttatctacttgtcctacaaggttttttagttcttcattcaactaaaatcacctcttaatgtctaacttttcagattctgaatggacgtcatagttttcgaaaaagttattaataatttgcatataatcctcagtaactatctcaccgtatgacgttttagtatttatttcaaaactaagcttaccaaactcatggaggtctattcctttaataacggtattaggattatcagatggtatgtaataataatcaaaatatataatagagccgttgataagcaacctatcaatcctatagacgtggaagaattttctatctcgtctaaagtgagctaaggcatctttaaactctaattttaatatatctttatacttagtcaaatcaacttacccccttataattaattttgagctacactagttttgtgttataatagttattgcagtagcagatataagtattatgtttaataaaattagcaaccaccaaccacctgtacttattaaccataatgaaaaacaagatagtatataaacaaccaccaagtagcctatatatttcataatgtttttacactcttttaatactactacgtatgctagtgatttagataagctaaacagaaaataaaaataaaaaataaaaagaggtatagctataatgcctgctagtataaccactaattacacctaatttcttttagctagataataaaatcttatataatacaactttaatataacattgaaacctgtttataaatcaacaatgttacattaatagtgtacggtatattttaaattaggaggactgaactaatagggtgaataataacatagctgtatttatatttaaaactttaataattattatttttattttgtttattttgtctattattaactcactgtcattaatatactctattcgacctagtacagttatgacttactttatattcggtgggatagtttctaatgtggcattaacaataactgataaattattattacacaaagaagaccccttacctgattatattctaaaagaagtagagctaaataacaatgaattacaagtactaaagaaaattgtagagtcacaaactaatgtttctgctgaggaagtaagagtaagagcaaaagcacaacgtcgaatactaaaagataaaaagagagatgctgtcaatgaaaacgaagaaggacattaaagaacaacgtaaagagctgaaagataatgctactgctgtttccttaacaaaaaaaggagataaacgtattgcaagtcctagtagagtgtgttgtttatgtggtcaatctctttcagggatgaattatactaaaggtaaagctatagctaaagttaatcattttcatttacagtactctaagtacttatattttgacatgtgcgcagatattaataactgttacaagaatttaaagaaagtaggtgaattgatagagtgagcgctgaaagtttaagagatatgttatctaagaaaaaaattgaagacgaagataaacgtaaatatatagctgatggatttatgtcaggtattactaaacttatgtatgactttaataaaaagattgacagaggggaaatagaagtaaaagaccctaatgatttgtataaagtgtttgttatcttccaacaaatgcaaaacttaattacagatggttctgatggtggtggtgctataccgcaattatcaagaccacaacaagagctctttgatgaaataacaaatgagaatagtaaaggtgagaaagaagtagatttagagaagttatctcaactatctgctgatgatattactgctatgattattgataaagaaaaggttatgaacgaagagaactcaaatacattctaaagaaaggtgtatatgaatggatggtaaagaattattaaaaataacacaagaaacattcggtacacaaaatgttacgcaagaacaagttgaccatattatcaacatgttaaaccctagtacttatatgctaaaatatcatacgttacgaggtcacccgataacttttagtattccaaacagggacagaagtaaagcacaagctcatagaccataaactaatgctgtggtctttaaactctgttaaacggtcataggaaaataaagaatatcctggtaagaaaagctaagtcctaacggatagagctgataccgtagtaaagaatctacaacatgtagaggaaaaactctaacgactaaatttctaggtagttatctaaatggagatagtgagaactagataagaaaactctttatagagaagtaaagcagagaacccttaaccaaaactaagggctataatatagtctaaacccttaataaatatcgggaaaccgagggtagtagtgggcaagttaagattgtcaacgatagtcaccctaataaagcggtaattaagagtagacaattaggactcagtgagatgtcagtaatggaaatggtacactttgctgacatgtatagttacagaaatgtaaagtgcctctatacgttccctcgattaaacagtgtgggggaattaaaaccttgttaaacgggcatagtaaaataatgtatagaaaaaacaatatactggtaagaaaccctaaatctgactatacacagacagtgggaaccaaccgtgctaactgttgactttatatgtagtgtatgctatactgtatttataaagttagctaaaagcctaacgactaaacttactaataactatataaacggatatagtgaaaatagtataagaaaattttaactaaacatgtaagaaagaaaaggtatattgtaatgactaaaaagaaaacacataaagagtttgttcaagatgtgtataatctagtaggtgacgagtatactgttatatatgccaaagataacaacatatcattgatacgaataccttactattataacatggatgaaatagacaatatactttcgtatttagttaaaaaagtaaagcaaggagctactaaccaaaattagtagctatgatatagtctaatcccctaataaatatcgggaaaccaagggtaaaaaatgacacaagagcagttaaagaaatttgtacagtcacgtcttaatcctgtattagataaaacttattttagagatattgtgaattgggataaagactccttaggctataaacaaattagaaactcaagtttgttttttagaactagtagtaaaccaggttcagttgagggtgttgacatagacttcctcgcaatggacgaatttgagagggtgaactcactagccgaaagttcggctttagagtctatgtcaagttcaccttttaaagtagtaagaagattctcaactccgtcagcacctggggtaggtatacacaaattatatcaacaatctgaccaatggtactatgctcatgtgtgtcaacattgtcaatatgaaaacgaaatgaaatatgctgattatgaccctaattacttaaataagagtggtaatcttttacttttaaacccagatggtattgatgaacaagctaaaacagtacaagaaggtacatatcaatacgtttgtcagaaatgtggaaaacccctagaccgttggtataatggcatttggaaagtaaggtatccagaaagaacaaaaaataattcaggtattagaggttactacatttcacagatgaatgctgtatggataagtgcaagccaattagtagagaaagaaatgaatacagattctaagcaagcattttataactattctttgggttaatggtatagcccctttatatagtaatatatatcgaataaccttgttaaacagggaaaccttaagtgctataaaaagcataaagcaatcctgtgctaaatctataatttaattatttacaagataacattatatggtataattaaattatagtaaatgccgaacgactaaattcctaggtaactatataaatggatatagtgagaactagataaaaactaataacttttaataaaaaaaaatgtataaagaaagagagggtgttaaaatggcaattaaaataactacagaagaatttaagaaaaaagtatacgatagagtatcgaatgaatatgaagttttaggagaatatgtaaataataaaacaaaaatacttatgagacataattctgagacttgtgggaataatgaatacttagtaaagcctaaatcttttttaggtggtaacagatgtcctgcctgtaataataaaataaaaggtaggaaatctaaaactacaaagcaatttaaaaaagaacttcatgatttagtcggtgatgagtattctttaattggtgagtatacaggagtcactaataaagtaaagctaattcataatgtatgtggaaaagaatgggaagtcaaacctaatgattttatatcaaggaaaagcagatgttttcattgtagaatgaaagaacataatttaaaacaaagaagaacccatcaacaatttttagatgaagttaagaaaaaatacggtaatgattatgaagttctatcagagtatattaattctaaatctaaagttttagttagacataaatgtggtttaacatgggaaataagagcttctcatcttatggagagagacatgtgtcctaaatgtaaaatgtctattggagaaaagattgtagaagaatatttgattaataataatattaaatatgaaatacagaaaaagtttgatgatttaatttacaataagccactttcttatgacttttatttacctgagtatgatacattaatagagtatcaaggaatacaacattatcaaccagtaaaatcttttggtggagagacggcatttaaaaaacaaaaattaagagatgagttaaagagaagttatgcagaatataacggttatttacttcttgaagtagattatggtaaaagaaaatataaagacattgaaaattatttaaataaaaagttattagtgtaaagcaaggagcccttaaccaaaaataagggttatgatatagtctaaaccgattcttaaatgaatgttaaagtattacgaaagtaacggtagtaattgatgccctatgaagatgttaaaatgcgtgttttaccagaagacatctttgacaataagtcagaaattgcaaaaacacagttatttaatagagataaatacaaatttatttcagtaggtatagactggggtaacttccactgggtaactgtacatggtatgactgaggagggtaaagtagatttaatacgtttattctctattaagaaaaacagtagaccagatatggtagaagcagatttagaagctataatattagagatatctaaatatgaccctgatattattgttgcagataatggtgattcgggtaacaacgtacttaaattaattaatttctttggtaaggataaagtatttggttgtacttataagtctagcccacgctcatcaggtcaattatatgcacaatttaatgaaaacagtaatacagtaactgtagataaattaatgcataataaacgatatatacaagatttaaaagctaaacgtataagaatgtaccaacaggtagatgatgaattaaaaacttatcttaagcactggcaaaatgtcctaatcatggacgaagaagatgaaaaaacaggagaactttatcaagttattaaacgtaaaggcgacgaccattattctcagtctgcctgtattggttacatcggtcttactcgtctaaaagaattatatgacaaaggcaacggtacagctttcacatctacttttataccaacggattataatagtacacaaaacaactcgtctaatgagttctattttgatgactaagaaaggactgacgacttgacaagtatattaaattatgatacaatacaagaagatgatataagtaaagagacatttaatttactaattgaagaacctttaactttatcctatgtttctaaatatagtgactttttagatgataaatatgattacatatataaatcactaggctttgataacttcatggactgttatttatacatagcaagagaaccagaacgtatatacaaaggtggagctaaagacataggctcattgaataaagtaaaaagaactgtagtacgtaatgggaaagaaattgaaatgacagtctatgaagataataaaaatgatgataaacctaaagagaataatagtgaagaatcaaaagaacctaaaactgctaaaggttctaaggttcttactcatggtgaagacgataaacctaatcctaaaaagattgccagttctctttctacactaaagaataaaggtgtgaacactgaccacatagatggcaacgcatcagtatacaaagaatttgtagacgataacaataacccaatagggttagcttcttttaaagaaacagattccgacattatattacacgggtatgtatcagacctcgaaactaatggagtaggtgctaggtctattctagagttaatttctttagcaataaagaagaacaagaacgctgttgtttatgatatagaattacctcaagccatagagttcttaaaatctttaggatttattaaatgtaaagatgagtatgtgttaaaaaagaaagatataaagttatttttaggtgagtacagtgagcttatttagcactgtactcatttatacaattatatatataagtattattatattagtagttgtaaatgtagtaataagagagaaaagaatgtacaatactaggaagttgcttatacaagtaaaaaaggatattataaacaacttaaaaaagggagatatgaatgattaaagataataatacaaaaacattggaagagttaattacacctatttctacagaagaaaaagaaaataaagttaaagaatttagtaaaacattatgtgagatgattaataagctatatagttcttacaatgtattaaggcaagaccctattgatgaaacacaaagattagacggttctctaatggtgtttcaaagtagattagatgatacattaacaggtgaggaacaccaaaaactttttaaattagcttttgattataatattgatatttttgaagctaacaagcagtttaaagaagatgtacaaaatggagaagctattaagttaggtgatgttgttgtaaccgacacagctttaagtaatgttttatctagtaatgagcttaatgttagtattacatttatgttaagcaaagactatgaagaaaagaaacgtattgaagaagaagaaaaggaaaaactagataagttataatagatattatgagacctttatggataggtaggaataaataatatgaaacgtaagtttagtagtaatgagattactataacacttataactattgtagttgctctatttatagtattaattacagtagcatttaacaagtaccaaattgctaaagaagataaggacagatatcaaaagctagtagaaatttatcaaaaagcagatgatgatgacggtaaaactaaaaaaaggtatgttgagaagttaaatagggctgaggaagaacttaaaaaggttaaagaagaaactaattataaaggttataatgataaaacagaaaaagaaagagataaagaggataagagtgtaagagaacgtatttatggtaatgataaggataaagatttagtattagtaaataataaggttgttgtaagtaatgaagttactagacctaagataatagaagataatggtgtcagtacagttgtagtacctcctgttgtaagtcctgttgagccaccaagtgaacctagtttaccttctcctagtttaccttctcctagtttaccttctcctactatacctaaacctattattcctaatcctattaaccctaatcctattctacctaaacctaacatccctacccctaacccactaccctctatagaacctgaaaaacctatagaacctgaaaaacctatagaacctgaaaaacctatagaacctgaaaaacctatagaacctgaaaaacctatagaacctgaaaaacctatagaacctgaaaaacctatagaacctgaaaaacctagctcagatactacgatacctttagttccattggaacctagcacacctgtagatgaaagtaatgatactaatggagagggataacctctcctttttttgctatattaaaagagtaataaaataaacattatagttggtgattttttgataggattaaacgtacttacagctatatccgtagtttttgcttgtgtaagtctactagcactaatggtatttgcgtatattaaaactgaaaaaagtagtaagttggttctatacttgatatatgctataatttctataggttcttatgtagtattaacaatgtttcaagccacgtcaatcattataaaaaatgatgttatagactctattgagaatacagagcagtatgtagggtttaataaccctttaattgtttttggtataagtttctttggagctgtaataggcagtttttggtttttagttatgaagattgtaaatactaggaatttaaaaaataaaaaattaaaggattgaagcatttgctattttcaaaagacgataaatgggatgaagcaaaagactttataaaaggtcaaggattagcagataattggatagaagtagtggattattatagacagataggtggtaaacatgtagctatgtttattgctattgataaagttaaatatatggtactagaagctacaaaggataataaagtaatattggtagataaggataataatattgtgttagaggattatgatattgttatggaaagtaagaaaatgttttactatatagaagaaccattcgaagtaaagataaatattcctaaacatatccaagatattgcctataataacactgttatactaactactattcgaggaggtaaataaaaagttgcctgatttatttaaaagtctaaggttaggtagtatgtataaagaagacactgaagaccttatggttcctttagatgatggaatacaagctaacattagacaaatagaacaagatacaaaagagatgcaagaaattactaaatctttgtatggtaaacagcaagcttatgcagaaccatttttagaaatgatggatacaaatcctgattatagagataagaagagttatatgagaaatgctcataatttacatgaagtgttaaagaaatttggtaataactctatattaaatgctataattattacaagagctaaccaagtatctacatactgtaaacctgccagatattcagaaaaaggcgtcggttttgaagttaaattaaaagacttagacgctacacctggtattaaagaaaaagagcagatgaaacgtattgaagaatttattcttaatacaggtacagataaagatatagacagggattcattccaagagttttgtaaaaaaatagtaagagatacttacacgtacgaccaagttaacttcgaaaaagtttttagtcctaaaaacaaaactaagatggagaagtttattgcagtagaccctagcacaattttttatgctactgataaaaacggtaagataattaaaggtggcaatcgctttgtacaagtcatagataagcaagtagtagctagttttacaagcagagaacttgtcatgggtattaggaaccctaggtcagacttaaattctagtgggtatggattgtcagaagtagagattgcaatgaaagaatttatagcttacaataataccgaaagttttaatgatagattctttagccacggtggaacaacaagaggtattttacaaattagagcagaccaacagcaatctcaacatgcgttagagaactttaaaagagaatggaagtctagtttttcaggtataaacggtagctggcaaatttgcctctatataaagtaatttatatagatgaagggttaactgctaagaacacctaaagctcaatacactacaaagtaacccgaaagggtaggcttgaatgttacgaaagtagaaaaaagatattgagatacgttaaggttaaatcctaagacgaagaacaatggttgtttagcatcgaaagtcctaaagaactgaaaggtctatggaatacgttcaacgactatcccgttacaagacgggagtaaagctccaagctattgggagaagaaaaatccttaccctacacaatagggataacaaatagtctagtctcgtactgaaaggtagagcatgtgaaatgacacaggtttacaaagtagcgtttgtaaataaataaaactaaggtttataaaaaaaattattcctttactagttgacaagtaatcttttatatgatatacttaaaccgtagagtatataaaagtaactagtaatagtgagggtactcaaaaagggatacgttgaaaaaggaataaaattttttataaattttagattacgaagtccccgtgatgatggctgatgatgttaagtttgttaatatgacaccaacagcaaatgatatgcaatttgaaaaatggctaaatttcttaatcaacattatttctgctttgtatggtatagacccttctgaaataggttttcctaatagaggaggaggtgctacagggtcaaaagggggttctactttaaatgaatcagaccctgctaagaagcaacaacagtctatgaataaaggtttacagcctctattaagatttatagaagaattaattaatagacatattatatctgaatttggtgataagtatactttccaatttgttggaggggatactaagtctgaattagataagcttagtatcttacaaaaagaagtacaagtatataaaactgtaaatgaagcaagagaagaacagggattgaaaccaatagatggtggagatgtaattcttgactcagcatttttacaaagtacagcacaagaaatacaaaaagaccaatatttagatactaaacaaaaagaaagacttcaattacttatgagttatacacaaccacaaactgatgagcctacagatgatagtaaacaagaaacaactaaccaagatgtaggaacagataatcagttaaaaggtgatgataacgtatatagaacacaaacatcaaataaaggacaaggaagaaaaggtgagaaatcttccgactttatgtagataatattagcaacctaattaatacttaggttgttattttttaatttggagctacatttatactatgttatactatgtgtgtagtaatgaataatgttgatgatatactttttgttatattatgtatgtacatataaaataacaattaagtgaggtgtataatcactttggaagaaatgaaatttaatgcttttgttcctatggacttaaagaaatccatagatacggaagatgatacaaataaatattctatcgtatctggttgggcttccacaccagctgttgatttgcagaatgacattataaatccaaaaggtattgatatagaatactttaaaaaaaatggatatattaactacgaacatcaacaagataatgtagtaggtatacctacagataactgttatgttgatttagaaaagggtttatttatagaagctaagctatggaaagatgatgaaaatgttataaaaatgttagacctagctgagaaactagaaaagtcaggtagtggtagacgtttagggttttctatagaaggcgctgttaagaaacgtaacataaatgacaatagaattgttgacgaacttatgattacaggggtagcactagtaaaaaacccagctaatcctgaagctacatgggaaagttttgttaaatcattccttactggaacggaaacaacaccagacacacaagtagatgcaggagccttacgtaaagagtcattagcaagctctattactaatttaacctatgtaacaaaaattaaagatgttaaagagtataatgatatttggaataatgtagtagaggacttaactaaatctaataatatgggttatgaagaatcagttattacattacaattagccaaaggactatcaagaaaagatgctgagatagcagttatgagtattaataaaaaaaatttagaataggggattatattatatgcctacggaattacaaaatattctacaagaatatgataacttagacaaagaagaagtatcaaaatctgtagaagagtctaaagaagaagtaaaagaagataaagtagaagacactaaaacagaagaaaaagaagaaattaaaaatgaagtagaagctacagaagagcaagtagcagaagctaaagaagaaccacaagaacctgcaaaggttactgaagaagatgctaaagaagcacatgaacaagaagaaaatctagaagaagaagtatctaagtcagctaaggagtcgaaagaccctgtagataaaaaagatactaaaacagaagacaaagacaacgagaaacgaaaaaataaaaaagacaaaaaagaagaaaaagatgaagaagacgaagaaaaaacatctaaatctatttctgataaagatattgtagatggtttccgtactatcttgaaatcattccaagacattaaaaaagaaaatgaacaatatgtgactaaatcagatttagaagaagtaactaaatctattcaagctttaactgataaaattaattctaatgaagaagtttctaaatcagttgagagcaaccaagaagataaagaagaagcagtagaaaaatccgtaacgactaataacacttcgaatgaacaagatgtagttggttatgtagctaaatcagtacaaacagaagaacaagcagaaactacagaagataaagaagaaagtagagacttatctgtagaagcccgtgaaaaattcatgagtacctataaagaaaaatctcaaaacccacatacgaatcgttcagaagtattgaatgcttatcaagcttacttaaatatccgcaacaatccagagcaagcaagtgaaaaagactttaatattgtaaaagaatttgctaatctttaattaagaaacaaagttgtgttatattatagtgtgtaaaataaaacaataaaaaaaagagcatatatgaaaggtgatatatataaatgaaccaaaatgaactttcaaaaaagcaacatgcagttgctgatgaattacaagaaaaattatcgaaatccttccaaactggatacggtatcactcctgaaacacaagtagatgcgggtgctttacgtcgtgaaattttagacgaccaaatcactatgcttacatggggaaataatgatttagtattctatcgtgatgttgctcgtagaccagctgaatcaacagtaattaaatatgatgttttcttacgtcatggtaaagtaggtcattctcgttttgtacgtgaaatcggagtagcgtcagtttcagaccctaacattcgtcaaaagaccgttacaatgaaatatatctctgatactaaaaatatgtcattggcatctagtttagtaaataacattgctgaccctggtcaaatcttaactgaagatgctatctcagttgttgctaaaacaattgaatgggcttcattctatggtgatgcttcattaacttctgaggttggtggagaaggtttagagttcgatggattagctaaattaattgatgctgataacgttatcgacgctaaaggtgctcacttagatgagaaattattaaacttagcttcagttaaaatcggtaaaggttttggtacagctacagatgcttatatgcctatcggtgtacattctgactttgttactaatattttaggtcgacaaatgcaattaatgcaagacaatagtggtaatgtaaatactggtttcagtgttaacggattctattcatctcgtggattcattagattacatggttctactgtaatggaaaatgaattaatcctagatgagactttaatcccacaaccaaacgcaccacaaccagctacagtaaaagctgaagtaaaaacagaccaaaaaggtaaatttactaaagaagaagaccgtgcaggtttatcttataaagtggttgtacattcggatgaagctgaatcagcaccatcagaagcacaagttgctacagtaacaaatgctacagatggagtagaattaaagattactgttaactctatgtaccaacaaagcccacaattcgtatctatttaccgtcaaggtaaagaaacaggtatgtactacttaattaaacgtgtagcacttaaagatgcacaagaagatggttctttagtattcgttgataaaaacgaaacattacctgaaacagcagacgtattcgttggtgaaatgtcaccacaagtattacacttgttcgagttattaccaatgatgaaattaccattagctcaaattaatgctagtattacatttgcagtattatggtatggtgctttagcgttacgtgctcctaaaaaatgggctcgtattaaaaacgtaagttaccttgcattaaaatagtaaatacaattaaaaattgaatacaatagaataaggagtatacctaagggttgctccttttttattactacttatagtatacacgaaaggaatttaaaaatcaatgttaacttataaattaaaaaatattaaaatggctactgtacatggtcaagtagaagtagatgataaaggcgtagttaaaggactaactgctaaacaagaaaaagattttgctaatttaccaggttttacacatatggaagacaagaaaacaacaaagaaagaagtaaaacctaaggaagaaaaagaagagaagagaccaattaaaaaaacaactaaaaaagaagataagtaggttgatagaatggtaaacagtatgtttggtggtagtttagacccttacgaaagctctttatcatatgagtatccttatcacccatctggaaacccaaaacatatagataaaagagaattagatagtattactctagctgattatggttggtcagcagatgctgtgaaagcctatatgtttggtataacagtacaaaaccccgatacaggacaacctatgggtgatgatttttataatcatatattagaaagagctataggtaaagcggaaagagctttagatatatctattttacctgacttacaacatgaaatgagagattactacgaaacagaatttaatagttatatgtttgtacacgcatataaaaaacctatattacaggtagaaaatttacaactacaatttaatggtagacctatgtatgattatccagctaactggtggaaagtagagcatttagcaggtcacgtacagttattccctacagctttaatgcagacgggtcaatctatgtcttacgatgctgtattcagtggatatcctcaattagcaggaatgtacccaccaagtggagcaacttttgcacctcaaatgattacattagattatattagtggtatgttacctagacaaagagcaggtagaactaaaccatgggaagtaccaccagaattagagcaattagttattaagtatgcactaaaagagatttaccaaatatggggttataatgatgttaccctgtgtgtagcgtaagttgcacatttccaaaggttaaatgctaagaaatcctaaagactcaataactgaaacagaatccgaaaggataaatggaatagttacgaaagtagaaaaaatattgagtatggtgtaaggttaaatcctaagtactgttacaatggaagtttagcagggaaagttctaagggattattaatcctatgaaagaccctcaacgactattccgtataggtgacggaagtaaagccacaagtgattggtggaagaaaaatctttaccctataataatagggataacaaatagtctgcactcgtcttgaaaaagagagctaggaattgacctagatttaatcagtagcgtgattaaataaacaaagttaattaaataataatttccttatgaaggaagttaatttaattaacatatggtaatctcattatcggtgcaggaatagcaaacaaaactctagatgtagatggaattacagaaacaataggtactacacaatctgctatgtatggtggagcaagtgctcaaatactacaaattaatgaagatataaaagagctattagctgggttaaaatcttactttggctccaatatgataggcatatagtaggaaggagatattaaatgcaaaaaccttttatgataggtactaataataatacttctaacataattaataagtctactatgtatacatctacaacacaagcagatgaacaagaacaaaagttatctacagctagactagagtttgacactaaggatatgagaagatttgtcaatgatagaggtataaaggtactgtgggaaagggcttacttttgtccttgccttaaccctgacacaggacatcctagagtagattgtcctaggtgtcacggtaaaggtattgcctatttacctcctaaagagacaataatggctattcaatctcaagaaaaaggaactaacaatttagatataggaattttagatactggtacagctataggaactacacaactagaaaaacgagtatcttatagagacaggtttactgttcctgaagtattgatgccacaacaacttatataccatgttactaaagagcgtatacaaaaaggtattcctttgtattatgatgtcaaagaagtaacttttattacatctaacgatggtaatgtttatgaagatgactataatatagagaacaatagattattcatggacgctaagtttgaaaacaaaactatatccttaaatattttaatggtacttagatatgtagtatcagatatattaaaagaaagtcgataccaatatactaaatttaatcaacctaatacaaagtttgaaaatttacctcagaagctattattaaaaagggaagacgttattgtactacctgagccatttaaagttaatgatggtatagaagaggacttagagatacaggtagaagaccctaaaaaagaatctaaagataatcattcaggtggtttctttggaggaatgctataatgcctataaaagcaactagacctaagttatttagaggcaagaactataaaaatgtaggtaagagaacagtagatgctatgcgttctgatattttagatagattacaagctacagcattacaagtagataatgtaagtgtcaaacgcatgcctacttatctacaaataaccgagaaaaagctagagaagcaaggtgtaatagaccttaagaaagcttttgctcattcatctaaaaagaagagaactaaagatggtggttggtatctaacggtacctataagaataaaaacaagtaaaatgaataataaaacataccaagatttaaggtctttaaaaataggcagttcaagtaattcagtatctactcttactgattatctagaaggtagacgtaataacataagccatccttctttaaaagtacctagcagtaatggcagaataacaaaagtaagaaatggtaaaaaatctagttattttatgtttagaacagtttctagtaagtcacctgcaagttcatggatattaaatagagacaaagttaacgagaataatttctctaaaacaacattaaaatatgttaggaatttaatgaattggaaaattaaaaatttaatgtagaaaggttatggaaataggatggcaataacatcagtagactcatatttattagagcaaataaaacccagattacatacagtactaagtaattgttatattatagatgaagttttaaaagactttgattatcaaactagggaaatgttcaaagaggctttttgcggtaagaacgcaaagcacgaagtaacggtagggttcaatttccctagctttaaaaacaactacgaagctcattacctaatacaactaggacaaggtcaagaggttaaaaactctttaggtagtatacaagggtcttatctagaagcttcgggtaacacatatagtgaacaatcagtagctaaaagagaaggtaatcgtttagtatttcatgtatctaaacctatttctaatgtaataagagtagaagacatagcgtttgattcttacgatgatgttaaagtatcagataacactgtatcttttaattatactaacaatgagacttatgaaggctacaacgcaaatattgtatatgtagaaaaaacaaatgatagtaaagggttagtaaaaggtattaccatagaagaacaagtaacaattgtgggtatgtcgtataatgtagatgttgctagatgtttagatgccgtattaaaaatgatattgatatctatgagagacagtatagaagaacaacaaacattccagctacaaaatcttgcatttggagatatcgcacctatattccaagacggtgagtcatctatctttggtagacctactataattaaatacacaagttcattagatttagattatacaataacacaagatattaataagattactttcaagaataaaggagcaaaaagataatggctaagaaaacacctaaaggtaaaacctttacaggttatgtacatatagatacatttttaaaaacagcacagaccttgtttaatatgaaagagtcacaggtagcaggttttaaagcctacatggaaggtaaacactacctgttcaatgaaaaagactttattccatttttagaaaagtatttaggtagagaattagaaatttaatatatagataggagaattatacatggcagttgaaccgtttccacgaagacctgtcactcgtccacatgcagtcattaatgtagacagtacaggtatcggtaaatcagctagctccagtgaaaagattttatgtttaattggacaagctgaaggtggtaaacctgataccgtatatgaattaagaaactacgcacaagctaaaagactattccgctcaggtgaattacttgatgcaattgaattagcttggggttctaatccacaatacacagcaggtaagatttttgctatgcgtgtagaggatgctaaaccagctacagctgaagtaggcggattgaaagttacttcacagatttatggtaacgtagctaacaacattcaagtaggattagaaaaaaatacaatcagtaattcattacgtttacatttaatcttccaagatgatagatttaatgaaacatatgataatattggtaatatcttcactatcaaatataaaggtagtgaaagtacagctactttttctgtagagcacgataaagagacacaaaaagcaaaaagattagtattaaaagctaatagcacagaagttaagtcttatgacttaacaggaggagcttacgctactactaatgccatcattaacgatattaaccaattacctgattttgaagctaagttatcaccttttggagataagaacttagagtcttacttattagaccctatgacagatgttaacattaaggataaagctgagtatgtaaaagcagtatttggtgatttagagaaacaaacagcctataacggacttgtttcatttgaacgattagtatctgaacaagcacctaaaaacgtagaagtagacgcacatgaagaatctgctactgtaacagctgtgtccccaattcaagaaatcacaccttttgaattaacaaaactttcaggtggtacaaatggtgaacctcctgctacatgggcggataaaatcgaaaaatttgcacatgaaggtggatactacatggtaccactatcctctaaacaatctgttcatgcagaagtagcttcttttgttaaagaacgttctgatgcaggtgaacctatgcgtgctattctaggtggaggatttaatgaaacgaaagaacaattatttggtcgtcaatcatcattatctagcccacgagttgctttagtagctaactcaggtatattcacaatggacaatggtcgtaagttacatgtaccagcttatatggtagcttctgctatcggaggtttggtaagtggtttagctataggtgagtctattacctttaagcaactacgtattaataatgtagaccaattatatgaatcattagacttagatgagttaaatgaaaacggtattatcaccgtacaatatgttcgtaatagagctaatacattctttagattaacagacgatgttacgacatttaatgataaaaatgaccctgttaagtcagaaatggctgttggggaagcaaatgacttcttatgttctgagttaaaacttgagcttgaaaataactttattggtactcgtactatcaatacaagtgcttcaattatcaaagactttgtacagtcattcttaggacgcaagaaacgagataacgaaattcaagacttcccacctgaagacgtacaagttattgtcgagggtaatgaagctagaatctcaatggttgtataccctatcagaagcttcaagaaaatttctgttagcttggtataccaacaacaaacattaagagcctaaactaggacaaggagtacctagtttaggtactcctattaaatttaataggagagtgaattaatatggcttcagaggctaagcagtctgtccatactggtaataccgttatgctaatggtaaaaggtaaaccagttggaagagcacaatctgctaaaggtcaacgtgaatacggaactactggtgtatacgaaattggtagtattatgccacaagagcatgtttacttaaaatatgctggtacaattacactagaacgtttacgtatgaaaaaagaaaacttcgcagatttaggatatgcttcacttggtgaagaaattcttaagaaagatattattgatatcttagtagtagataacttaacgaaacaagttattattagttaccatggtttaactaaatagaccccttgtacagtgatgtgcattgaataataccttaaattgctagaacaccgtaaagctaactaaactacaaagtaagtcgaaagactaagcttgaatgttgagaaatcagaaaaaattagttagatggtataaggttaaatcctaagtactacataattggtaattagcatccaagctcctgtaaaatggagaaggttcaacgactataataggtaagtcttagttacatattaagattatggcatagtctagccccttaaaatatatcgaaagatagggtataaacggttcagcaaacaactacaacgagagttggaatacgaattgacaataacagttccctctatatagtaatatatagttgaataaaacctgaaattgcggggaaaccttaaagccaattaaactacaacgtaacttgaaaaagtaagcgtgaatgttgagaaatcagaaaaaattagttggatagtatatggtgagataaaagcattaataactaacgacatattattaatgtcctaagtactcaatcaataggaaatccgcaggcaagcctacaaaagtgggaagcttcaacgactataataggtagattccttaatacttaagggtcatggtatagtctaagccctttaaaatatatcgaaagatagggtaatattttactaataatgtaaaattactggaaatagtcacagaagaaattgagtttagttacctttaactaatagaggctatgtttggtgacaagcatagaaaacactttaaattgcgtgaaaatcttaaagactagataactacaacgtaacttgaaagagtaagcgtgaatgttgagaaatcagaaaaaatatctagtatagtataaggttaaaccctaagtacagtaaaatagatgatacgcaggcaagcctacgagagtgggaagcttcaacgactataataagtgagtcttagttacacattaagattatggtatagtctactccctttaaaatatatcgaaagatagggtatagaggacagcatcagataaggctagaacttaaatttcgtattaagacctaacaataaaagttaggtctttttttatacttgttttattagaagtactgtattataattaaaaataaaaggaggtgtactaaatgacaaacaggaaaacaataggtaaagtaagtaattcaagggcaacatggaaaattaaaccaacaacaagaattaaaaaagataaaacaaaatattctagaaaaaataagcataaaggtattgacaattataaataactgtaatactatagttatataaggagatgatgaactgtgaaaactttttattcaggcagaagaacaacaagtaaaaacaggcaagtaaagaagcattataaacaaatgactaatcaagaaataattatatgtaggaacttactaaaagaggcttataataaaaataattactttaagttaacaaatcacttcaaaggtaaatgtaagaaaccagtaaattttaaagcgtttgttcattatatacataataagaacttagatattatagaatataatgaaacattatacaataacaaaatacaacgtagggtagttgttagacacccttatgtagtaaaagtaaataataaattatcttaccaatatttagttatagaagttgaaacaggtgaagttgtaactatgtactataacagagtcacagataaccacaaaacattaaatttaaatgattattatgataaaaatttaaaaataaagtattgacataagtaaatacataatatatactaaggttacattaataaagaggagaataaaaaatgacaaataaattaagagctatccatgaagaaatgaaaattgagttacataaattcccacagaatgtagatttaacaagtaagacaactgctatcgcaatcaatcaaattctttacaagtttaaaaccttaacggaacaagcaggtaaaatcactaaaaagtattttgagggtcaagagattttgacgattgattttgaatattatgactcacttcaagattactacatttacttacttaaaaatagtgaaacaattgaacaaaggttacaagaaattgaaaaaagagtagctgaatatgttaagtaatttggagttataaccacattatgttatactgtatgtgtataaaaaacataagttagctgttatattaattatgagaaaataataaaggatggataaagaattggaaaaagaacaaaaagatattaaagatatgacacctgaagaaattgatgaattaaaatatcagcaacaaaaagataaagagcgtgttattaacaaagtaattaaaggtgttaatgatgtatgggagaaagaatacaactttgaagaattagatttaaaattcaaagtaaaaattagattacctaatgctagagaacaaggtaatatcatggctttacgttctgcatacttaggtggaatggatgcttatcaatctgaccaagttattaatgcttatcagatgttagctactctacaagaagtaggggtagaagtacctaaagaatttagagaccctgaagagatttataacctaactccacttgctattatgtgggatgattggttagactttatgacgtcctttcgttactagtaacgtaaagaagttaaatgaagatatagaacggttaggtggactttcacatatagctagagagcctttatcaagaaacttatgggctatcatgcgtgagtttaatgtgctacctaccgaaaaacgttttaaagatttagatgattaccaaatagagtttattatagctaacatgaatttagatacaaaagaaatgatggaagctagagacggtaaaaactatgatatgaaagcggaagacgtagacacatcatggttcgaagcgccgacagatgaatttgatgttgttcctgatttcttagacttagatgatttaaatacacaagtagataaaagtttaagtgagaaagaaaagatagaaagagatagacgagttgaagctgagttagaagatgaaaccgagggattaacaactcaacatttagctatgatggaacacataagacaaaaacaaaaagagcttgatgaaagtttaggtattgataacaaagaaacaacacaagaagatataaacaaagcaatagaagatatagatgattggtacatgtagggtaatggtataacaccaatacccttattttttgattaggtggtgaatactgtttggcaatgaatgacgattataggttggtcttgactggtgatagttctagcttagaacaaagtttaaaagctatagagatgtacatggatgcgttagagtctaaaaacatagatgcaccattaacaaacttcttagagaaattaaaagtaatagcaaaagaagtaaaatctgtacaaaacattatggataaacaaagtgataagtctttaatatcaccaaaagctatggatgaggctattagttctacacagaatgtaactaagaatataaacgacctaaagaaagctttaaatgacatacaaacagataatattacaaagggtatagctcctgaccctgaagtagagaaagtatatagtaaacttaataagacactaaataatacacaaacagaactagagaaagtagcatctcaaaagattggttcagactcagatataacaaacagaataaaagaaatgaaaacactgaaccaagttacagaagagtataataaattagtaaaagatgccagttcagctaaggagtacacaaagcaactaagagctaatcgtaatatggttagaggtcatatatctaggtctgaaggctctaatagaatgtcctatgaccaaggtgctagagtacgttctgaattaggtaaagtagacacttttgaaaagcaacgagaagctaacaatagaagaataaaagaaaaccaagatagatatagaggttatagacaacaacaacaagatttagtaggcaaaagagctcgtggtgaaataagttctgaggattataaaaaacaatcagcttctattaaaatgatgattgatgaaagtgaaaagctttctgaagtttatagaaaaacaggtgctgaattagacaagtcaatcaactactataaaaatagtgctaaaaaacagtttgctcagcgtgagatagaacagcaacgaggaacaatgggtaaattgttccaagatagattaccatctattggtgcacatgctactatggcagtaactgctcttgcaggtggtatgtatatgaaaggtgcctccttatccgaggcaaatagacctatggtaacatcattaggacaaaattcagataatatggatatagacgcagtaagaaatacatatggagatttgtcaatagataataagcttggttataattcaactgacatgctaaaaatggctacgtcatatgaaagttctataggacataaaagcgatgcagatacgtataaaggagctaaacagttagctgtaggtggtcgttcattaggtatacaagaccaagaagcttatcagcaatccatgtcacaacttatgcatacaggtggcgtaaactcagataatatgaaagctatgcaagatgcttttttaggtggtatacgtgaatctgatatggttggtagacaagacgagcaattaagagctttaagtactattgccgagcagtcaggacaaggtagaacattatctaaaggagaaatgtctaatcttacttctctacaagctcaagtagcgggtacaggtagtaaaggtctacaaggtgcacaaggagctcaagccttaagtagtattgaccaaggtattaaaaatggtatgggtaattcttatactagattagcaatgggatggggtactaagtaccaaggattagaaggtatgcatgacttacaagcacaaatggataaaggtatatcagaccctaataacttagttaatatatttgaccaagctaataatataggaagtacaacaaaagaaaaacaagccatagctaaaaaaggctttgaaagcatgggagctaacttaacacaagagcaaacagatgagttgtacaatctttacgcctcaggtaaactatctaaagaagagttagctagtaaagctaagagcatggaacaagaaggctctaaagcaggagataaaaataaggataagtattccgagtctaaagcaggtagaaatgaccataacaaagctaagacagatgataaagctgaggatatttatgacttagctcaacctattagagatgttcatagtgctatggcaagcttgccagctcctttatacctagcttcaggagcagtacttgcctttgtagcatctttagctaaatctactgccatgatggctggtggttctttattaggtaaaggtcaaaaaggactaaaagattggtttaataaccgtaaaggaggttcaacaggtaagactggtggtggtaaacctggtggtaatcctaacggtggtggacgctttagaggacttaaaaacttagctgacactatactaggtgataaccctagaggtggataccgaccatttaaagaccaagcaaaaggagcaggacaaactgctaaaagcatgggtaaaaccttatttgatacctttggaaaaagagattttacttttggtgaatatatgggaagaaccaaagacctaggtaaaggtgcatggaacaaaggtaagggagcttttggtaaagctaaaggtaaatttagcggtaaaggttctgacttaggttttatgtcacaagcacctactgctaacgcaggaggtcttggtaaactaggtggtcttacaagtaagctaggttggattggtgcaggtctatcggcgtttgatataggtagttctttaatacaaggagatactaaagaagcttcttctaaatttggtaatactataggaagtattatagacccgttaaatttaggctatggagatggcttaagagattatgctacgaaaacagcggaaggttctatgacaagtgatggttggaaattatggtctaatggagataaagatggtaagaataaattccaagactctcctgtaggtaaactatggggtggcataacagatttcttcacaccagataacccttctaaattagacgagacagtgaaaaataaaaaaggtaacataattagttatatactaattgccttgcttatagagcaatctgtaagtaccgagtgttaactgctatgaaactactaaagctaactaaactacaaagtaagtcgaaagactaagcttgaatgttgagaaatcagaaaaaattagttagatactctaaggttaaatcctaaggagaagtacaatgggtgtatagcatcgaaagtcctaaagacctgaaaggtctacggaacacgttcaacgactattccgtataggtgacggaagtaaaaccacaagctattggtggaagaaaaatactcaccctataaaatagggataacaaatagtctgcacacgtagggaaacctagtgtctagaaataactagagaatatacagtagcgtgtatatttaaacattgttaaaatatataaataattaaaatttgtattctacttctgcatataaacctttcttattttgtaaggtaaacttgttattaaataaatatacataactaatacgataggttatatatgaaagtatactattgtttatatgttttaacttatggtattaatgataaatcacaaagtaaagacaggcaaaaagcagaagaaaaaagagaaaagaataatgattctagagaaggaaatgtaacagtatactcacatttcttagaccatttagcagacaatctaacaaataaaggcagtagttccgacaatagttcatcaggaggaacacttgactatcttgatggtaagaactttacagataaagacgtaactaagcatgacttaggtaaaactgctaaaggtgtaaacgccgaaatgttaaataaatggattgagtctcaagcacctagtaattctaaaatgcgtggtttaggtgagctttatatgaaagcaggtaaagagtcaggacttgacccaaggtatttagtagcacatagtgctgttgagacaggctggggaacatcaaatctttccaaaggaggagaccctaacaaaggtaactggttcggtataggtgcttttgataacaatcctaataatggttttaactatggtttgggtattgttggtggtgctaaatggattagagacaatttctacaacaaaggacaaaagaacttacacgatatgagacacaacaatggtgttcatgaatatgcaacagcaggtaattgggatactatgattgccagtattatgaaaggttcagacaagttcataggtggcggaggtggaggcagtgatgttatgcctagacatgctctaaaaaacgaccatcaaccaaagaatcttaaatataacatagaagtacctaaaagtaaaaaccctaatgaaacagggaaagcaataggtagaaaattaaaacaattattagaatctaatttttagaatacaattataatacttatatattttaacaaatggtataaataataaaaaacagaaaatgtctacagaacaactaagagaaaagaataataaatcagaaactaaaaacttaaaaacttacagtaacctattagatagagcacaacaaattatagaagatgctaaagcgctagactcaggaggttcagacagtagttctgactcagggggttcagcttccgatgtagatggagaaggtgcgggtaagatttacaaattccttaaaggtaaaggtttatccgataaccaagtaggtgccgttatgggtaaccttaagcaagaatcagggcttgaccctaatgcaaagaacgcctctagtggtgcttttggcattgcacaatggttaggtagtaggaaatcagaccttgatagctttgctaaatctaaaggtaagaagtctaatgacttagacgcacagttagatttcttatggaaagaaatgagttctggtcaaaatagtgatatgcttaaaaatgcaggatggagtaaaagtggtagtttagaaaaaaatacaaaagcttttgcacaaggttttgagcgtatgggtgctggagaggctatgatgagtactcgagtaaataacgctaaaagttatgtaagcaaatacggtaagtcaggtggcggtggcggtggagctataccatcatcatatacgtccgtattaagaaacccgatacttagtagtgcttcaggaagtactgcatctcaaaataatgtatctgtgaatgttagcattacaggaacaaatgacaaaagggatgctgaagaaataggtaaaggcattaagtctacttttggagatgacttagatattttctcaaacacatataaacgtaattactagggtagtattattaagtactaccctttatataaagaaaaaggaagtacaagtatgtatagaattagacgtcctaagatacgaatagaaatagtaacagatgataatacatttacattaaagtttgaagatactaaagattacaacggcaatcaatttgcttcaaagttacttagttttcaaactaagaatgctatggaagatgatagtgctgtattccaaataactatggcaggggatacgtattgggataagctagtaatggcaaatgatattattaagatatatattacgcctaataatgaccataaagataaagagggaaaccaagagaaacttatacaagtaggtatggtatctcaagtatctaaagtaggtagttatggtaatgaccaagtacaatttagaataacaggtcaatcatttgtaaaaccttttatgaagtttggtttaggtgttattcaagaggtacaagctgtattaccaactgttggttggttagttgatggcgatggagagaatcaggttaaatttacaggtagttccgctaaagatgtaatgcaaggtattatacaacgatttattccttacatgaagtacaattatacggataaaacatacaacacattagagagttacttagattatgatgatttatctagttgggatgagtatgaaaagttaactgaagtttctgcttttactaacttcgatggtacattaaaacaacttatggacttagtaactgctagaccttttaatgagttattctttagaaattcagataaacataaaggtaaagcacagctagtattaagaaaaactccttttaatccaactgaatggaaagcactagaatacatagttgtaccaactgatgattttatagaggaggatgtaggtaagagtgatgtagaaacctactctatctttacagtaaaaccagcaggtatgttaaaagaattaacaggggatgtattctctaaacctcaatttcaccaagaattagtagatagatacgggtattctaaatatgaaacagaaaacctatacataggaactaagagtggtagtgctacagaagatagtgaaactacaggtggagataacggtcatgaacgagtaacttatgacagactacttaaagatttaaataactatggtagagagtccatatctaaaggattagataaatactctagtaagatatcatcaaagtacaacaatattactaaacctgaagtaaagagtattttagagtcttacataaaaaaaggtaatttaagtaaagaagattatgaaaagataacaaagaataatacttcaagagaatcagtatctgatactagaccaaagttaacaaaagaaaaattaaagtctatattagcggaaaagtttaataaaaaagaaacttttgatgataaagatttaaataagaaaacaacaaaagctgtaatagatgatattacaaagaattataaatatggtaatcctacacatgctaagaaactactagaggattacactagatttaaaggtaacccacctacaagtaccacaggtgatatttatgataagtatcttaaagccgtagaaggagtagctaatgttgctagagatacaggttctgacgcaagtgatgaccctttaattatatttactaaaatgctatttaattggtatcactcaaaccctaatttttatgcaggtaatattgttgtattaggtgaccctaagtatgacctaggtaaacggttatttataaaagataaacaacgaggggatatatgggagttttacatagagtccatagaacataagtttgattataaacaaggatactttactacaataggagtaacaagaggactaaaagatgctattataaaagatggtgaaggaagcaaacataggtttaaaggactatggaatcagtcatctgactttatgggtggtcttatgggtgaagagacatctaaagaattaaaagaaaaaggtgtagccgagaagaaaacaaaaggaaataaagatggagattctgacggaggcgcacaagatgggggtaccttagcttcactagaaaaatataatggtaagttgcctaaacacgacccaaattttgttcaaccaggaaacaggcattacaaatatcaatgtacatggtatgcttataatagacgtggtgagttaggtattcctgttccgttatggggagacgcggcggattggattggtggtgctaaaagtgctggttatagtgtaggtagaacacctaaacaaggagcttgtgttatatggcagagaggcgctcctggcggaagccctcagtatggacatgttgcttttgtagaaaaagtattagacggtggcgctagtatatttatatcagaacataattatgcaactcctaatggctatggtacaagaacaatagacatgagttcagcaataggtaaaggtgctcaatttatatatgataaaggataattgatatggcaacggataaacaagttaaagatgttatagataaatttatagataatcttttcaattttgaagtattaaccaaagaaaaggttgaagaaaaagatagagaagttaaaaagataactacagaagacgtatataataaagttgtttatattagaccatatgtaggtgttatacaaagtataacacctagacaagtaacatatgatagttttactaataatggtacagatatagaagctaaactcacacttagaaaaataagttatactactgataatctcacagtacctactgatgcattatcaacttgtatggtacatatggtagaaagaaatggtgtacttgttatagattactttgatgagttacagaacatactgtatggtagttacatggataatgagcatatatttgatgaagatgttccagttagtacattagtaacattagacttgaaagataatttaagtagttataaacatatacaatatatgtttaaagggaatgcggataaaaacccttttgaaagtaaggatatagtacctttagatacatacaacttattatattggatgtataaaaagagaaatgtagagctaaaaaatccattaacagttaactacttcttcacaggtaaaagcttctatactatatttggtaaaggacacaaatataaagttgatattgacaaattcaaaataggtgatatactattctttggacgtagtgatgataatatagggatatacataggagataagaagtttatttctcttatgggtacatttcctaaagataacacctctattagtacctataagttagacgattattgggatgactttaatggtagggttatgaggtttgatgaggatgatatagcatggtggtaagattacaatcttctttaggtagaagtttaaaaaagatagactcagaagaacttaatgttaaaggtctattattaggtacagtaagcaaaataaattataagtaccaaactgtagaagttaaaataaatagcttaacattaggacataatcctagtgatgatggtaagttagctgttccttatcctaaagattatgtaggaagaacacctgaaggtagcatgtatggcagtaatactttaataacggaaggaactactgtactgttaggatttattaatgatgacattaattaccctattatactatctatctatggtaatacagaagcaaaccaactcataaatacgaatcctttagagggtggtaaaatgagtaatgatgatgtttataaatacagtagtgctttgtattctatattacctgacctaacttatacatataaagatggtgaaggtacatctataaaaacattcaatggtaaatctttcttatccattacttcaggtgataaagaaaaacccttatcttcagacttttatacaggtactgaataccaagacttatttccatcatactatagtaacaaaaatttaatagaaccgagaatacaaaaagcacctaacatgctatttaaacaccagggtctatactttgatgatggttctgaagataatcatgttacaactttatttatttccgaaaaaggtgatgtaagagcttcagtattagacaaaagcacacaaaaaagaacaacacaagagatgtctcacgatggttcttatagagttataaagcaagatgatgacctattattagactcagcgcaagtatgggtagagtttggtataaatgataataatgtgttttacataaaaaaccctaagcatatgtttgaatttaatgataaaggtatatatttagatgataagccaattttagatacgttagatgctagcattacagagtctatagatagacttaaggaagtacagaaagaattagatgacattaactacttacttgaaggtgtaggtaaagaaaacttagaggagttaatccaagagactaaaaaatctatagaagtttctagtaaggcaagtagcgatgttacgactatgaaatctcaaatatctaatgtaagtagtagagctgagggtattattacacagtttcaagagtttagagacaaaacatttaaaggcttatatgaagatgcttctactatgataaataaatacaaccaagaaatacctgagttaaaaagtagattgaatactctagatacaattacattacctaacattaataataccttattagagaaatcaagtaagacctatgttaataacagttttcaaagtgttagtagtaattatctaggttcattactgcaattagatagtaaccttactatttatccatacacacctacacgtattacatggaataagatagtttttaataattctgagtttgtaaataagactaaggatgcttttgttattccgttaggtgtatctaaagttaaagtttctattaatcttaaatgggatatattacaagataaagtaaaaactattacagtcaagaagaatagtgatacatacaaaactataactaatggtaatacacacgataatataattacaaatgttatacctgttaaacaaggagatacattcacagtagaagtacaacaagataatgatattaaccttacattactacaagataatacaatgtttagtatagaagtattagaaactactttagcacctactaacactgagttattaggtatagtatccgaacaaacagataagcaactacaaacacttgtaaattctaatgttgatttattgagtttgacaacacaagttactaaagacaatcagttagtctgtcttaatgattctaaattagatactataacaacaggtaaaggtaatgtgtctgattacactctacaacaaataaagtcattttcagctaagaatggtgagagtattttatctttagaagatgtattagctaaatataaaaattctattagatatagtattaatttaccaactactgcaaacatagtagaactactgaaaaaatataatttaattggtataagagcacctaggaatcaagtgtatttgaaagttaaagatttaacaatcacacaagaagtattaaataatttttctaacttaccagtattatataatacttcctatctaacaagtacagatattaacaaaggtatatatacaaatatatacggagtactactaccatatactagcatcactcaagatacagtaaatacagcacataataataacctatctatatatgctagtggtgatatgacaagtgatattataaataagcttattttatatggtatagatggtgtagaaacaaataaaatattagagtttaaaaaagtttaaaagtcctattaatagggcttttttatatatgtcatgttatattaaacttgagaaagtagttgtatttaaatactatatatgatataatacgatatagaaaggtggtaagttatgcctcaatcagatggaaagaatacaataagacgtattgcattacgttttccaacagcaagcggtaaatataatatgtaccgtttcaaagtaaaccctgaaagttatgaaatagatgcaccacaaagaacatctataactaaaactaaatcagacattattgttgaagactatggtaaagatatagagacaataactttttctggtactactggatttagacctgtaaaagaagtagatggtactaaaacaggaaaacaaaaaatagaggaactacaagaacaagtagaagcatacgctaagcagggtggagatggtagcgtagcaggagcttatatagagttctataactttactgatgataaatattacaaagtacatctagcaccgcaaggtttaaaaataacaaggtctaaagatgaatccttgttatatagatatgaaataactttagttgtgataggtaaccttgctgaagcagatagaggttccgtaacatctgctgagtttggtaatgtaaaacccaatgctaaacaaagagttgatgagggtgttaatgatttagatagtaacgcacgaaaaacaagaaacaagaataatcaaatagtatcacaatttgaaaataaaagtagtcaaagctcttctaattctagtagtagcggttcacgatatggaacggcaggaacattaagaggaggtagtggcataagaataggtggttctgaaggtaatagagatggtatgagtaatataggtatatataaccctagacagaatactaatggtcttagtagtactgttgatgatatggcacttaaaataggatacggtgatggaggtgtatctaggtaatgaataattatatacctcaaccacaaggactattaaggtttttaaatggattagagttagacatgtcttacacacatatgaacttattagatgaggaagcaccttttgtttctaaattctatacaccacaaatacaactaagtgaacttgcaagaataaaattaaaagagattaagtctactgatatccctactttagaaagaacatttaacaacaatacaatagttaataaagtagaacaaacaagtttaaagttacaatcacctagaatgtatttaattatgcaatctatcgtaatggaagcttacgctattgtaaactgctttgtagaaagtcctgaatacttaaaatatttaacagaaaaagatgtatctatagtaagaagtaatgttaactacgtagctgactatttaagtgattatgaagaatacaatagtattgttctcgatttaagagacttagacttatgttttggctctttggaattacaactaccactaattaagagtgaggtggtataatgagatttagaaagcatgaagtccaatcagaagaaaccttacaagctatatcacaaaggtattatggtgatgttagttactggttagatttaatagaacataacaatctacaatatccttatattgtagatacagatgaagaaaagaaaaagaaccccgagcacttaataactaaaggtgatattattatcatacctttagatgctgagttaacagactcggtttctaaagaaataacatcaagagataaagatgtattagtagaattagctttaggtagagacctaaatatgacggataataacgagtatatagacgctcatggaacagatgatgaaatattagccctatcttcagatggtagaggagaccttgatatagttaaaggcatagataacattaagcaatctttaagagctagactattgacacctaaaggttctttattattacatcctgaatatggttctaacattcataatttatttggtttaaatatacctgaacaagctacgttaattgaagtagatgtattaaagactctaacatcagatagtagagttaaatcagctaacttaaaaggttgggagataaaaggtaatgaatactatgggtcatttaatgtagaaatcaagtccgtagaagaatctatagactttgtattaggtcaagatgattcaggtgtctttgctttatttgactaagaaaggaaatttatatgagaacaagaaagttaacacagatattatctaggttaatggataagacgatacaaggtacaagcaaaataacagactttacacctggttcagctgtacgctctcttttagaagcagtagctttagaaatagaacagtattatatattaacaagagaaaacattaattggggcattcaagaagggattattgaagcttttgattttcaaaaaagaaaagctaagcgtgcttatggtaatgtaaacattcaattttaccaacctttagacatgagaatgtatatacctgcaggtactacattctcatctactaggcaagaataccctcaacaatttgaaacattagtggattactatgctgaagaagaaaccactgaaattacagtagaagtttattgtaaagaagttggtattgtaggtaatatacctgaagatatcattaatacaatagcctcaggctctagtttaattcgtacaattacaaacccgacttcctttaatacaggaacaaaagaagaatctcaagaggattttaaacgtaggttccatatgtttgtagaatcgagaggaagagctactaataaatctattagatatggtacattacaagtacctgatgttgatggtgtttatgtttatgaagaagtaggtcatgttactgtatatgcgcatgataaaaacggaaatttatctgctactctaaaaaatgacataataacggcattagaagattacagacctagtggtataaaattagatgttgtaggtgtagagaaagaggaaatagatgtgtctgcagtagtaacaatatctaataaagctaggataggtgacacattacaaagacatattgaaagtgttatcagagggtatctaaatagtctgactacttctgatgatttaattattaacgatttaattcaagctattatgaatatagatgataatttaatttatgatgtagcatttaagaatttatctacaaatatagaagtatcttcgaaaggtattattagagcaggggatattaaggtagaattaatatagggggtaaacaatggctaattttttaagaaatttacaccctttattaagaagaaataagaataataaagataaccaagaccctaactatgctttaataacagcacttaatgatgagatgaacaacatagagtcagacaccattaaaagcaaacttcaatcatcattaaaaactgccacaggagattacttagataagtttggggattggtttggtgtatacagaagaataaatgagaatgatgacagctatagaaaaagaattataaaatacttattattaaaaagaggaactaacaacgctattattagtgctattaaagattacttagataatgagaatataaatgttagtgtatatgaaccttttaaaaatatattctataccaataaatcaaaattaaatggtgaagattatttaatgggttattattatagatttgctgtgataaatgtttctgttgatggttactttcctttagagattatagatgtaataaatgaatttaaacccgcaggtgttaagttatatttaacttatgatggtgctactaccataaagggtgatggtgttgttaaatggcttaaaaatctacctaaaattgaaacatatacggatttagatagattattaggttatgatgaaactttctatgggcatttaaacatgagtgaagcaacagctgaacaatctgataaaacaaggttcagaacaaataagagtatattaaatagtgaagatattctatcaggctcttctaatattggacgtagatttataaattatgcttatgttacgacatatgcatatgaacctactagtacatcagccgtcacacatatagcttctttaaatgataaaggaaaagaagcacctttagattattacttatacacatccttaaagaatactaatgatataaatatatcaatggaaactgcttatggtgtatcttatttatacaataactttaatgtaagtgagtttatcagtagatacaaacctaatatagatataactagagataatgctaaaaaacaaatatccgattttataggagaactaacaattgatttctttgcaaaagctttagtttcacctgatgaatcattacctattaagttacaaatatttgattttcgtactaatgaatggttaactgtatcagaaacagaactatctttttacgagaaaaacataggtgtaaacataggttatataagagattacttaaatgatgaccttaatttatttacaagattagaggttaatataggtaaagatgagcaaaaagatataagtattaactacatggatttacatttttataattataaaaaagatgtgtatactatcaaaccttttaaggcactagttgaaaactacatagatttgactaaagatacttatattgaaggctttaaagtagcctcattattaaatggagacataattaataaaaatggatatcaacccataaaatatttaaggttacatgctacttatgattcaactaaacctattgtaagtattacaggtaaaaacagcaataatgaggtacaaaataatacacctatagatttatataaaaatacaactaatagaaacttattgcaatcatataaaggtgatagtaatatattcaagggtgttgtaagcacaaaagagttttatatctcatcatgggctgacaccttatataactcaacgtatttatctaaagtactagaaccacaaaaagtatatactttgtcattcgagatggaaatcacagatgctaatatggacttaaaaacatattctgacaatcatggtatatatttatatagtagtactaaaggtattgttgctaatggtgttaaaagcatgcaaagaaagataggtaataagattgatgtatctaccacatttacagcacctacaattacagaccatagacttgttgtttacacaggtagatatacagcagatggtactgcctctaaaacacctattgcttctaatacggtaaaagtaacaaaccttcaactaaaagaaggagctactaggaaggactacacggtagcatctgaagatgtaactaatgttatagacaaagctattgtgtttgataacatattaacagatatacaaacaataggaataaatacaacaacacctcttaaaaatattgagctaagttattcttattatggggataattggacaaacctaaaaacaataagtaatttaagtcaaggtgaaacaataacacctaataacctagtagatttatatggcttagaaacaatagattattcaagtattacacctttctctagggttatacttaaaactatatggaatgctaacctgaataatttaacaaataaaaaaggtagtatttctaacatgagtaataactatttcaatgctgtatggcaagaggtagatatgatatataacactacattaagtagcatgagcatacttactgatagtgaaggtaatgtatttgatagttcaacaggacaggtaataaaattagcacctaagatataccaaggatatactgatgtagatagattgctaacgtctactactctatataatgagaatattacattaggttcaaatagatttatttatgacttacgggatatgttactatcaagtgatacattcacagtagataataaaattaaagtaatagatacatacacagaagtacagtaaagatattgacaataaagtattaatatgatatagtaaggtatgcgtattatagtataccttgttatattaatacagaatactagacatgaaaggaataaaaaatatggctatagcaacaaatgcttcacatgtagaattagctaaatacattgtaagtaaggctgattctatttatttaacaattggtaaaagtacagcgtggtctaatgaaacaagtccacctcaacctgaagaaacagcaacatcattacaagaagttatcggatataaaaaagcaactaaggtagcattagttagacctgcaaaaacaacgggtgatgaaagtaaaaaagaaattacatatggtaataaacgatgggtagaaattgactcagctaatgcagttgctgaaggtgctaagtgggtgtacttagaaagtagtattgttggagatgagttacccttaggtacgtatagacaagtaggatttgttatggatttgttagctaaagatagtatttctaaatttaacttattacctagtgaagtgcaatctacaggaactttattattttatgataataaacaattccaaaatagaagtgaacaaacaactgtaaaagagcgctttatcattgaagtttaaaaaggagaattgaatatatatggcaattaattttaaaagttctccatacttagatagatttgaccctacaaaagatagaacaagagtactatttaatccagatagaccactacaacaatcagaactaaatgaaatgcagtctattgaacaatattacttaaaaaatttaggggattctatttttaaagatggggataaacaatcaggattaggttttacattaactaaagataatgtactacaagttaacccaggttatgtgtatataaatggtaagatacgttactatagtagtgaagacactgttaaaattacgggtgtaggtaaagaaacagtaggtattaaactaacagaaagaattattacacctgatgaagataatagcttattagaccaaacaagcggagttcctagttatttttctaagggtgcagaccgtttagaagagaagttatctttaacagtcaatgaccctacttctgctactatttatacttttatggatggagacctctatatccaatctactaatgctgagatggataaaatcaacaaagtattagcagagcgtacttatgatgagtcgggttcatataaagttagtggatttgagctattttcagaaggaaacgccgaagatgataatcatgtatctgttgttgtagatgctggtaaggcatatgtaaaaggttataaagtagataaaccagtttctaccagaattagtgtagagaagtcaagggaattaggtaaagcagagaatgaaagtactgtatttaataaatcatcaaataatattactttagctaatacccctgtaaaagatgttcaacgtgtaacagcgcaagtattagtagataaagagcgtgttacaagaagttcaacaggagattctcaagactatttatctaataaaacagcttttgaagtagttagagtatggacagaaacaagtccaggtcagacaacaaaagaatacaaacaaggagaagactatagacttactgatggtcaaacaatagactggtctccttcaggtcaagaacctaatggaggtacatcttattatgtttcgtataagtacaacagaaagatggaagtaggtaaagattatgaagtatctacagtaggtgagggagtaggtaaacgttggtctattaatttcacacctgttaatggtactaagcctattgaccaaagtgttgtacttgtagactatacttactacttagctcgtaaagatgctgtttttattaataagtttggtgacattgctattcttaaaggtgaacctaatattatgagattagtaacaccacctttaaatacagaccctgagaacttacaattaggtactgtaacagtattacctgattctaacgaagcagtatgtatttcatatgctattactagattatctatggaagacttacaaaaagtaaaaactagagtagataatttagagtataatcaagctgttaatgctttggatgatggtgcaatggaaaaacaaaacccattaacattacgttctgtatttagtgaaggttttatatctttagataaagccgacattacacatcctgactttggtattgtatttagttttgatgatgcagaggctactctagcgtataaagaagctgtgaaccaacctaagattattcaaggagacactacagctcatgtatggggtcgactaatttccgcaccatttacagaagagcgtacaatttatcaaggacaagcatccgaaactttaaatgtaaacccttataatataccaaataaacaaggtgtgttaaaattaactcctagtgaagataactggatagacactcagaatgtaacaatcacagaacagaaaactaaaaaagtaacaatgaaaagattctggagacataatgaaagttattatggagaaacagaacattacttatattctaacttacagttagataaaggacaagagtggaaaggtaagtcatacgcatatgatagagaacatggtagaacaggtactctattagaggctggaggacagcgtacacttgaagaaatgattgaatttattcgtgttcgtgacgtatctttcgaagttaatggtttaaatcctaatgataataatttgtatattttatttgatggtgttcgttgtgctattacaccagcaacaggctatagaaaaggttctgaagatggtacaattatgtctgatgctaaaggcacagctaaaggtaaatttacaattccagcaggtattcgttgtggtaatagagaagtaacattgaaaaatgctaactctacaagtgctacaacatatacagctcaaggacgtaagaagactgtacaagatgttattatcaaaacacgtgttacagtaaacttagtagacccattagcacaatcattccaatatgatgaaagtagaactattagttctttaggtttatactttgctagtaaaggagataagtctagtaatgtaactgtacaaattcgtggtatgggagatacaggttaccctaacaagacggtatatgctgaaacagtaatcaactcagatgatattaaagtatctaataatgctagtgctgaaactagagtatactttgatgaccctatgatggctgaagcaggtaaagagtatgctattgtcattattacagaaaatagtgattatactatgtgggtcggaacaagaacaaaacctaagattgataaacctagtgaagttattagtggtaatccatatgtacaaggcgttctatttagttcatctaacgctagtacttggactccacaccaaaattcagatttaaaatttggtgtatatacttctaagtttaatgaaacagctacaattgaatttgaacctattaagaatgtatcagcagatagattagttttaatgtctacgtacttaactcctgaaagaacaggttgtacttgggaaattaaaatgattttagatgacatggctacatctactacatttgaccaattaaaatgggaacctattggtaactaccaagatttagaggtattaggtttagctaaacaagttaaattaaaagctacatttgagtctaataaatatatttcacctttattaagttctaatgacttaacgtttactacattcttaactgagttaaaaggttcctatatcggtagagctattgatatgacagaagctccatataacacaataagatttagttatgaagcattcttacctaagggcactaatgttattcctaaatattcagacgatgatggtaaaacttggaaaacatttactaattctgctcaagtagttaaggctaatagagactttaatagatacgttattgatgagaaagtaaaccaatctactaagaataacaaattacaagtaagattagacttatcaactgaaaatagtttcttaagacctcgtgtacgtagacttatggttacaacaagagatgagtaagtttaaagagggtttcataccctctttttatttaactaaggaagtgatattatgcctacagaatatagagacccttactcacaagctaaactctttattcctactgtagaagaaaaagctataaaagaaatggaacaaacatataaagataaactacaagaagttaatgagcttattgatgagcttaaaaaattgaaaggtgattacacacatgacgtttaactacacacctctaacagaatcacaaagattaaaggatatgtaccctaaagtaaatgaaatgggtaaatacttaaaagaagaagttaacttatctgatttaaaaactattagttatcctgacttaaataatgttctaaatttcatacaagactcaggtgactattttgtaacacaagccagaaacaccccacaaggtgtaagtaatacagggtttttacacttagataaaaagggtagtacttattataagttatattatgccccatctaacacaaataaattgtttgtgaaaacttattataatggtactgtctatgattgggttagttttaaactagatgaaggtacactatacgattcaggaaatacaattaatgtaaaagatttaacagagtccacaactcaatttgcaacactcataaatccccctaaaagtactttaaatacaggatggataaattataaggaaagtaaaaatggtacctcagctttagctgagtttaatcctattaattctacttcaacatttaaaatgattagaaagttaccacgccaagaccaacaacctaacttactaagggatagtttattcacattaccaatgacggatgtagctaatataagaacggattatatagataatacatctttttggggttttactaataatgcatctacctcaacagttagatatatgggtgaaaatactattcaattagatgatggaggggaatcatatcctactgttatatctaaacgttttagattagggaataatttatatgtaggtgatacagttacaatgtctgtataccttaaagtaaatgacactagtttattaaatggtaacttcccttactttgaaatagcgggttatgataatgtatctcaaacaaataacccttacacgggaggaagaagagaagttaattactatgagttatctacagaatggaaaaagttctcatttacctttacattacagtattataaccaagagtctagcaatgacactgttaattatatatcagcattattaagatttaactgttctaactctaaaaataatggtgctattgtatattatgcactaccaaaattagaaaaatcgtactcggtaactccatttattacaaatacttatgataaaagaaaatatgatgagatatggagcaattggatagagacaacaagcaaggatgaacttcaaacacacagtgctgtagatacgtacaacaatgactactacaaatatgtatggaattatcaaaacgcaaacggtagaagtttacaacaattagcaatgtctgtacctcaaggtttttatactttttattgtgatagttctataagtggaacacctaacaataaaactatacaaggtacgatacaagtagcatacaagaataataatataaacactataaataaaataatacaaatggattttagtgaccctaaaggtaaaagatattctttaacatataataaagatactaatggttggcaagatatgaaagttcaaatgtctagtaatagtctttgggaaggtactcttgacctagcttcaggtaatacagtaaacttatccgattcattagataattatgattttattgaagtagtatactggactagaagttctggacataatacaactaaaaggtacccagcaagtacatctagtattgtaattagagattttaacttagtaaatgatggttctaatgctagtgtagacttttttgaagggtattgtgacattacagatagagtgaatgttactgctaaaatgtcaaaaacaaatacaatagatgggaatagaaatactatgtctgttgctcagtttaataaaactggtcatattgaagtattaagagttgtaggactaacgtatatttaataaggagttttgtaaatgataaaatatgatattagtaaagatgaaattgtgttacatttagaagatagtaagtatatcatgggttacactattgttggggggtatgatgagaacaacggtgacgtaaaaatttctaggtcaattcttcctgacgggttttttactgagtttgttagtactaagtatgtatactataagaatactaacgaagtaatatataacaaaaattttaaggataatgctaagagtattgaagatgctgattaccaaccacctaaagagtatgttcctaaagaagattataaaaagctagaaagtgaagtagaagaattaaaaagaatgctacaagaattgttatctaagaaaggataaataatatggcactaaattttacacctattacagaaaatagtacaatagcagatttaacaaaacaagttaataatataggtggtgtactaactgaggacagaaatgtctttgaagtaacaacagacttacaagcagatgtaagtagaacacagaaagttaagttaacaacagatagagggttagctaaagatattgattatactaattacttaagagatattagaaaggtaggtctatattatataggagctcgtacattagctactatgtatgataaacctgatatggaaaacatggatgtactacttcaagtactaaccttagatactgaggatagagtagtacagatattacatacattatctaccgctgattctaaagtaaaagtactatataggtttgttaacaattatcaaacatcacaatggcaagtagtacaaagtctaccaaataataaatacacatctcaaataggtggaagtccttttgatattaacacacaaggtatatattatgtgtctagtatgtcggatatgccaaatggtgtatatgaagggtttttacaggttattatagacaagaatgaaaatagaatgttaagattaacggatattagcacaggaaaagaatatcttaatgttaaaaaatcgtacggtagctggggcacatggaaaactgatttagatgtacaaaaaataagtaagtatttattatctaatgtagatggtgatgctgaaagtaataactactctttatctgtatatactacagacaacataacatttcaacaggcaatagctaaacatattgaagaaacaagtaaaactgtttttactttttatatacaggggggtgttgtagggtctccgtcctcagttagttgtagaggtgtattcatatcagattcaactaactttactaacctatatggtgtttatactgctataggtactgatggaagaactattaatggttctgtaaatggtaatacatggaacacaacaaaaacactaccaggatttaaagagctgtggaatggtgcacataactttaaagatacaaataaaaaagaaaccatgtctgattctatatctaactaccagtatgtagaagtatacacaagatatagagctctacaaaatacaaaaggtactgataaaacaggtacactatgtcataagttctatatagatggagacggtatttacacatgttcaggagcttatgtatcaggagactctaatattggagtagagtactatcgagtaactttatctattactggtgatacttggacaattaaagatagtgcagtaaataataataaagaccaatatgttacacgtgttgtaggtatctctttatcgtagactaggataattcctagtctttttttcttgactaactttaataaatatggtaagataataaaggactaaaaagaaaggagaatatatgcagttaagacaacagaatatatatacatatgtagattttgatgaaagtgatgggtatattaaagatatcatacttaagcgtgttcataaaacgttaggagctaagaaagatggctatcaacatagcttagcttttaaacgaggtgtgtgggatggttatgtagatttctatgattatgctgagaacaaattccctagtggattgttacctaagatgataacattactaggtgagttacaatcaagacataactttcaatatgaaattattgatgaaaaatctgaaagctttttatctgaagaagatattgatgatgaaatacaactactagataataatgtaggtaaaattacattacgtgattatcaatatgaagctgtgtttaatagccttgtcaattacaatggtatatgcaagcaagctaccaatgcaggtaaattttgccccttatagtagaaatattataagtgtaactcctttaattcatgggaactctctcatttgagacaatcatgagccaagcctagtaaattactaagaaggtgcaacgactattatgtacaatcaagtggttggaaacagggagaacctaagtctcattagatatggttaagatatagtctgaactttgtaggagactacaagaaggttaggagtaacgaacctaatcgtaacaaaattgaaaacagaggttgctagcggtatcatagaccaactattaccacaactagaaaaaggagagcgtgtagctttctttacaagctctaccgagatttttaatcaatctgctgaccgtttaagtgaacgattgaatataccagtaggtaaagtaggttctggtaagtttgatgttaaacaagtaactgtagttatgattcctactgttaactctaacttaaaagaccctacagaaggagtaaaagtatctgctaaagtaaatttaagtaaaaagatagctaaagagatacttcctaaatttgaaggtggtaaaaatcaaaaaaggttacttaagttattattagaaagtacgacacctaaaactaaagtagagcagaatgtgcttgatatacttcaagatatttatcataattcaaagacggatgctgaagtattaatggcattaaacaatcataatgttattttccaaaaagaagtaagaaagaaaaatcaaaagagttatgataagtatcataaaatgcgtgaatttctagactctatagctgtaatgatagttgatgaagcccaccacagtaaatcagactcatggtatacaagtttaatgtcctgtgagaatgcattatacaggatagcattaacaggctccatagacatgaaagatgagctactatggatgcgtatgcaagcattattcggagatattattgtaagaacatctaatgagtttttaatcgagaatggctattcagctagacctacaataaatattattcctattgctaaccctgatgatatagataatattaaggattacagggatgcatataataaaggtattgtacataacgagtttagaaataaacttattgcaaaactaacagctaaatggtttaatcaagataaagctacacttattattattaactttgttgaacatggtgagatactatccactatgttgaatgaaatgggtgtagagaatttctttttacatggtgaaatagagtcagatatgcgtaaacaaaagttagatgaaatgcgtaatggtaaacttaaagttatgattgctacaagccttattgatgagggtgttgatattagcggtattcgttcattaatcctaggtgcaggtggtaaatctttacgacaaacactacaacgtgtaggtcgtgcgttacgtaaaaagaaagaagataatacaacacagatatttgattttaatgatatgacacataagtttttatataaacattctaatgagcgtagaaaaatatatgaagaagaaaaatttgaaattaaagaattaggaaagtaggtatgggtagtgactaagacagaaagaagattatatgattacattgaaaaaaaatcaaaaaataatacttatcaaatagctactaaaaaagagttagcagaagagctagatgtctcagtctctactttatctaaaaaccttaaaagattagagcaggataacaaaattaatgttgtttctaaaagaggaaataaaggtggtattgttatatcactagtaagagactatgatacagatagtctcttacattttaatgatacagatgacaatgttattacttctaatctagaatacgctactgaattacgaaatagattttttcctagctacgtatatgaaagaaaagaaaataaacgtagaacaaaactagaaatggttcaatataatgctagtaaagataaaaacaggaaaataatatcagatatgaatttttataatagtagtttaccttaccctactaaagatatttttaatatgtcttatgaccccgagggtttttataaagcttatatcttatgtaagttatatgaccaatatgctatagcacacatgaatgctaaatatatacaacatttaacattatcaaatggtaatgaagacgtagatagacataagcatttatctgagtactacagaaagaaaatgttacagaatttatcacgagatagtatttgtaaagacttctttggtagtaagacatttaatacattctacaacttttacttaaagataaaagataagaacattaatgtttttaaatatatgcaaaatgtttttaagaataccacatttgggtttgagaataaaacacaaccttatcctatacctgcacctaacttttttagttcagataaatatctaactaattatgaaaattatgtaaaaggtattaaacgaggtgtaaataaaacaaatagacaaattggggaagtagagtctttaattaagtcatctgattacctattaaatcctgctgtagcacaattacatcaattatatacaacacctttaaatgaagagatacatgatattgatacaatgtttaaaacagctttagatatagaagatactatttatggtatatttaatggcatgaaacatattatacttttatcatataataaatatatagaacatctaatagaaaaattacctagtaaacataaaaacttattaaataaatttattaaacaatgtattgtaaatgagtattcacctactacaatacctaacaatgctagactatctatgtttttaatgcaaaaagagtataaagcaaatatcgcagaattaaatggtggtatagatagaagagacttaataggtataagtttagtaaacactacagacttaagtaaacaagatattgtaaatatagaacaaacaacaatgaattatctacatatgagaagatttacttcaacatcatatattttacaaatgtatagtaattacttaggttatgaggttaatttaaaagaagttaagtctataattgaaaaatataatttaattgataaaataccattgacaaaagaaggtatgttgaactataataaggttattgatatagtaaaggatgacacatatgagtaaacgaattaaggagattatcctacataagtctatgaaggatatacattttgcaagagaagtactagataagttacctaaaagtctatttgctacagaatcggaagacatgggttacttattcacagctataaaaagaacagcacacattgctgataaaatgtcaaatgaatctttagctattaaagtagaacaattaatgggtagtgataaacaagatgatgaaaaagtaacacaaacattaaaatatttagatagcttatatacagtagacatgaataataaagacgattctgtaaactatgaagtagaaaagtatattaaaacagaaatgtctaaagaagtattagttaagttcatagctgagaataagcaagaggactcagataacttacctgaactagtagagaaactaaaacaaatagaagtcagtgacattaatggtactgacggagaatttattgacttctttgaagacgtagataaaaagagagaactattaagcaacttaagtattaataagtactctacaggtttccattctatagaccagcaaattgaaggtggtataggtagaggggaagtaggattagttatcgcacctacaggtagaggtaagtctcttatggcaagtaatttaggtaagaactatgttaaacaaggtttaaatgttttatatattgccctagaggaaaagatggatagaatggtattaagagcggaacaacaaatggtaggtgtacaaaagaatcaattacttaatggtgacttatctttaaacacagatgcttataataagatacaagaacattataaaaagaatagacaactgctaggtaacttttatatcgttaaacatatgcctggtgaggtaacaccaaaccaattagaacaaattataattaatacaacaattaagaaagataagcatatagatgttgttattattgattatcctaaacttatgcgtaacccttaccttaagtatcaaagtgaatcagatgctggtggtcatatctttgaagatattcgaaaattatcacaagaatacaattttgtttgttggacattagcacaaacaaacagaacagcttatggttcagaaattattacaagtgaacatgttgagggaagtagaaagattgtcaatgctgtagaggttgcttttgccgttaaccaaaaagatgaagaatttaaaaatggttttttaagattgtacttagacaaagtaagaaacagttcaaacacaggtgagagatttgttaatcttaaagtagagccgactaaaatggttgttagagatgaaacaccagaagaggcagaagaacataagcaaatactagcggaacttaatggtgaagataaaagtagatttaaagaaaaacctaataaagctgaagctattaataattcttttggagggctgagtttttaatggatgactttactaagctttataaaaaagtacgtagaacatttacacgtaataaagcagaatgggattatacaaatacaggattaagaaccttccaattaaaaggaactaatgtatgtgttacattactagactctatagcaaggaataatacaacaggatataagtacaacgttatgtctaataaagtacctgctataccttgcaatacacatcaagaagtaattaaagcaattgaatataagttaaaaaattgagaaaaagccttgacaatgtatttgttaaggcttatacttttattataaacaataaagaggtggtaagatttgaacttaaatgaagcaaaagtaaaattaaaaaactttaaagtcattaataagcacggatttatagagactataaacacaaagtactctgaaaaggagttagaggacgtctcaaccgatatatttaatacattggataattacgtaatagataagtatggttgtaaattgtttaatattaagcctaaaagaagtattatagagttagaattaacaaacaataaaattaaacacttaagaaagtaggatattaatatggaattagaattaaataaaatatataacgaagattgtttagaaggtatgaagaaaatacctgacaatagtatagacttaatagtaaccgaccctccttatttaattaattataaaaccaactggagaaaaaataaagagcatagatttggaaaagttattttaaatgataataacgaacaacttattataaattatattgaggagtgttacaggatattaaaaaacaatagcgctatgtatatgttctgctcatcagagaaagtagatttttttaaacaacaattagagaagaaatttaaaataaaaaatatgattatataggtaaaaaacaatcatacagcaggagatttaaaaggttcttttggtagaaaatacgaaatcttatttttagtagtaaagggcaaaaaacattttaatgggagaagattaactgatgtatgggaatttgatagggtaagtggtaaaaaacaattacaccaaaatgaaaaaccattagatttaataaaacaatgtattatgaagcatagtaataaaggagatgtggttttagatgggtttattggtagtggcactactgctattgcttgtatgagtactaaccgcaattacattggttttgaattagacgaagaatactataatttagccagtgaaagaatagaaaaacataaggagatactaaacaatgaaaatgacaatacaggaactacaagataagactgaacttttaagacacgtaaaggtagatacggaagaagcaatggatatccttgaagatatattaagaggagagccttacacagatgaggtatgtgaattgatacatttttattcaagtaagctactaaatgagattaatgacaatcatatgtttaaattacaggagtttgctaatcatgatgttatagaaattagtgaagagggagtaaaataatgataaaattattacagggggattgcttagagttattagatacaattgaaaatagcagtatcgatgctattgtaacagaccctccatataacattgcaaaagaaaacagatttacaactatgggtagagctggtattgattttggagagtgggataaaaattttgaatctactttatggattaataaagctacaccaaaagttaaaaaaggtggtaatatcgttgtgttttgtgacatgagacaatttacacctattattgatactatggaagcattaggctgtgaatttaaagatgttatacgtatggaaaaatctaatcctatgcctcgtaatagagacagacgattcatttttgatactgaatttgctctttattttgttaaaaaaggagctaaatggacttttaaccgtttagatgaaaaatatgaaagaccttgtattaaaacaagtgtgacgcctaaaagtgaaaaaataggtaaaggacatccaacacagaaacctttatatgctatggaatggttgttagagcgcttaactaatgaaggagacattgttctagactgcttcatgggaagcggaacaacaggtgtcgcatgtaaaaagttaaataggaattttattggttgtgaattatcagaagaatacttcagtatggcacaagatagattactaaataatacaaattaaaacaaaacccttgacaacatgtttgttaagggttatacttttatcataacgtactaaaggaggacactaatgaaatttatattttttacagatagccattttcatatgtttacgaattatagtaaacctgatgaagattatggtaatgatagatttaaagaacaaattgagacattacaaaaagtatttgatttagctagagaaaataaagctaaagttatatttgggggagatttattccataagagaaatgcggtagatactagggtatataataaggtatttgaaacctttgctaagaatcaagatgttaaagtatatatggttagaggaaatcatgatgctgtgtctaattctttatatacggaatctagtattgatatctttgaaacattacctaatgtggaagtaactaaagatttacgtagtgactcactttctagtaaagtacaattaactatgtgtgcttatggagatgaaacagaagaaattaaggagtatattaaaaaatcttaccaaaaagataaagtaaatatactagtagcacatttaggtgtagagaatagtttaacaggtaaaggctctcatagattagaaggtgcatttggttaccaagacttattaccagaacaatatgattttattcttcttggacattaccatagacgccaatatctaaacaataatcctaaccatatgtatggtggttctctaatgcaacaatccttttcagatgaacaagaagctaatggtgtacacttaatagatacagataagttaacatcaacgttcatttcattagatactagaaagtttattacagtacaaggtgacaatgtaccatataacatgaatgatttagtaaaccaaggtcactttattaggtttattggtactccagaacaagctaaagtaattgaattagataaaacagaagatgaatctaatgtacaagtacaaatgaagaaagaatacacggtagaaaagagagtcgacgctgacgtgtctgacagccctataacgattacttctagttatgcggatagatactacccagaagcaaaaaatgagcttctagagtgtttaaaggaggtactatagtatgatagatatcattataaagaatattaaaccaagtatagataaatctaaacctattttacagttcttacaaaataaaagaacatatgatgtatgtaatgttaaaaatattgatgatgcgatgtaccttattaacaaagtactagaggaagctaactacgctcattattatacgagggttattgaacaagaagattgttatattctagattatggttcacatcaatgtttctttaaattgttaaaagaaggtggtacaaatggttaagtttaattatgtagagatgaataactttttagctattgagcatatcaagctaaatctggataagcaaggtcttgtacttattgagggtattaataaaacaaatgatagttttgaaagtaatggaacaagtaaaacgagcatgatatcttctattacctatgcactgtttggaaaaactgagaaaggtttaaaggcagatgatgtcgttaataagtataagaagaaagacacctacgttaagctttctttcaacataggtaaagacgagtatttaatcgaaagataccgtaaacataaagaacacaagaacaaggttaagctgttctgtaataacaaagagataacaggctctacaaatgatgttacggatacccaaatacaagagttatttggtattccttttaacacgtatgtgaatgctatcatatatggtcaaggagatataccgatgttttcacaagctactgataaaggtaaaaaagaaatactagagtctattactaagactgacatttataaacaagctcaagaagtagctaaagaaaaagttaaagaagtagaggagaaacaaagtaaagaacaacaagaaatagaaaaactagaatataaaagaaacctaaaacaagaacaatataataatgaagtaaataaatataataacttattagagcgtaagaagcaagaagaggaacagtttaatcaaaagaaacaagagtacgagaataaattaaaagatttagacaatcagattggtgtatgtaaaggtagtattcctaaagttgaagactttgaatttgtatttagtgaaaattatacaaaagctaaccaaggtattgaaaagattaacacaagtattaatgataaattattgccattattgagtcaagaaacaacaaataagaatacaactctaagtataattaatcaattaaaacaatctattaataaactagatacaaatgaccattgtcctgtttgtggttctcctatagataatacacacaaaataaaagaaaaagaaaacttagaattacaaattaaagaaaaacaagctaaaatatctcagtacgaacataatgagcagactataattaataagaaagaagagctactagctaaatctaaagaattacaacaatttatacagcaagaagatatagaaaagaaaaaacatgatgatgatattcaacggcaatacagagaacagcaagaagtatatgatgaaattagccaattagaaaacactaaagctaatttaaaagaaccaatattaaatgattactcttatatagaagaacctaatgaagaattacacaataaagaactaaaagatattgacaatactattgacaaacataaggaaaatatagtacaattagagagtaagaaaacaaaatataaacaagctgtagatgcatttagtaataaaggattacgttctgtaatattagactttattacaccattcttaaatgagaaagctaatgcgtatttacaaatattagcgggttcggatatcgaaattgaatttcaaacacaagtagaaaatgctaagggagaacttaaagataagttcgatgttattgttaagaataacaatgggggagagtcttacaaatctaattcagcaggagagcaaaaacgtattgacctagctattagttttgctatccaagacttaattatgagtaaagaagatatatctacaaatatagccctttacgatgaatgctttgatggtctagacactattggttgtgagaacgtagttaaactactaaaagatagactaaaaacagtaggtactatttttattattactcataataagagtctagcacctttatttgagaatacaattacggtagtaaaagaaaacggtgtagctacactaagaaaggaattaaataatgaaactaaagattaaagataaccagtttgcatctttaacagtaaattatacaaacaatgcaaagttacatatagataatattcctgtttctactttagtagactggtaccctttaagtaatgcatacgagtataaagctagtaatgactttggatatattgaactaaagagattacgctctagcttacctgtgtcttatgggttaactcaccaaaccttatataaatgtgaaactgttaaatgtaaattaggattatggtataacgaaaaaataaaagaagataatgagaaaattattgagaaagctaagttgtacggtttacctactatagatgaacccttcacaagtaaagatgtaaagcaaggatttagtgacttaggtgttattttccaaacactaaaaacaatcagtacaaacgagtacttgaaagataaaacaattgaagagattaacacctttagtaagaaatcagaggattatcaattaaatgaagtactcaagtacagtacaacattggtagatgatacttatagtgatttaagtcaaatctataatatgttactattaatgaagaaaattgtttctatataggaagtgactgaaaatgaggtttgaagactttttaagtcaagagattggaacacccaaagagaatactgtaggagaattacgatattgttgtcctttttgtggggaacagaaatacaagttttatgttaagcagtctttagactctactaatggtatgtatcattgtaagaagtgtggagaacatggtaaccctattacttttatgaaatcttattatagtattacaggtagacaagcttttgagttattagaaacaaagaatattgatatacaattctcaccaacattagaaatatataacacagatttaactgaaagtgagaaattattactaaggcttaatggatatacaaaagataatagtagtataaaatcaaaagcacctgaactacctatagggtttaagttgattaaagataacttaaataataaagaagtagtaccgtatttaagatatctcaagaatagaggtattacactacagcaaatcctagactatagtataggatatattataaatggttattgctattcttatggtattaataatgagaaaaagaaaatagtacttagaaatagtgttatattttttacttatgacaatgaaggtaagtatatatactggaatacaagaagtattgaaacaaatccatatattaaatctataaatgcaccttctaaacctaatgagtatggtaaaagcgatgttatatttaatttaaatatagctagtaaacaaaagtttgttgttataactgagggtgtttttgacgcccttacatttgataagtacggtatagctacgtttggtaaacaagtttcaaagatacaagttaataacctcatttcaagtattcctaaagaaacacctatatatattatgttagacacagacgctacagactttagtattaatttagctaataagcttatctcacatttcaatgtagtgtatttagtaccacatggtaatgaagatgctaatgatatgggtatggaaaaagcttttagtactttgaaacacaatagatttttagttacacctgaaagtattcaaagttacaagttacaacaaaagttaaaactttaatcttgcattataatgtatagtatgttacaatacatatataaaaataaaggaagtgttattttggaagagaaagatattctacattttgtagatgagtatgttacagcattacgtgtaggtaatgaacagcgtatgcaccaattagaagagttaggtaaagaacaaacagcaactttaacagatgttatgaaagctattactaacttattgttaggtgttaataaacaaatggttgacctagagcaaaatacagagttaaacttaaacattctaattgatgctttatacaaagctgagttagttaacgatgacgtattaaaatatattgaggaagcaattgaagaatcaaaagaaaaggatgaagaataatggaaaaaaatattagtacacatacaaaaggtatttcacaagaagatatggacatgtggttagaagctattacacaaggaacagtagaaggcaaggaattaactgaggacactgctaaacaattacatcgtattggagcacgtagtgtatcattagatgaggctactagaattgcacgagcaattaatgccgttacagttcaagagtatgcatctgcctttaatgatgcttttaatgctattgatttgttaatgattgttatggaagataacctaggtgtaactaatgagcaggtagagaaagctcaacttaaattaaaagaaaaacgtgaaaagtatttagaagaaaaacaagaagaagtaagaaaaaaacaagaagaacataaattaaaagaagataatgaaaaagtagtgcagttgaagaaacatgacaaatagtaaaaaaaaaggtgatgtattcgaaagaaagattgccaaagaactttctgattggtggggttatccttttagtaggtctccacaatcaggaggtgcatcatggggagctaacaataatgctgtcggtgacattgtagcacctttagagtctaattttccattagttgtagagtgtaaacatagagaaaattggattatggataatgttctacttaataataaagaacctcatacatggtgggaacaagttataggagatagtttgcaagttaataaaactccttgtttaatatttacaagaaatagagcacagtcatatgtagcattaccttatatagaagatgtatatgttaagttaagagatgaagaataccctattatgagaacggattttattgtagaaaatgttagaaaagataaacatttttatgatgttcttataactacgatagatggattgactaacttaacaccttcttatattatatcttgctacaacaaaaaagagattaaaccatatagagttgtcaagtctaaaatatctaaagttagtaaaaaagaagataagttgattgatgatttacttgatggtatataaggaagggatactagttgattacacaaataaaaaaacgtgatggttccgttgtagattatgatttaagtaaagttactaatgctattttaagagccaactcagaaacagaagaatatattgaagatgttattgattctcttgtagatgacgtagactctttactagaagaacaagatactatcattactgtagagttaatacaggatatagtggaagaagttttatttagtagtatgtataaagacacagctaaatcttttattttatatagggataaaaagaaaagagagcgtaaaagagacttattcaaaccaagaaaagaattaaagccctatgaataccctgaattgttagaatataaagatgctatacgccaaagttactgggtacacactgagtttaactatacatcagatattcaagactataagaataacgttaaatacaatgagcaaatgaccattaaaaaagctatgctagcaattgcccaagtagaagtagcagtaaagactttctggggtgacctatatcatagaatgcctaaatgggaaactggagctgtgggtgcaacttttagtgagagtgaagcacgtcatgccgacgcttattcacatttattagagattttaggtttgaatgaggagtttaaaacaattgacgatattcctgctcttaaagaacgtgttgatgagttagcgatgcatgtaaaactaagtaagagtgaggatgatagagattacgtactatctgttttattattttctatatttattgaacatgtatctttatttagtcaatttttaattatgatgagttttaataaatataaaaacttatttagaggtttatcaaatgctattgaagctacatctaaagaagagcaaatccatggattatttggaacagaaatcattaatattcttagagaagaaagacctgaatggttcaacaaagaaatggaagatgcagtttacacagcctgtaaaaaatcttatgaatcagaaacacggttacttgattggatgtatgaagatggggaactagagttcttacctaagaaagtagtacaagaatttattaaaaatagacttaataactctctagtagctgttgggtataataaactttttgatgttgatgaagagttactaagtgaagtgtcatggtttgatgatgaagttattagtactaagttaacggactttttatctaaacgttctgtaaactatacaaaatttagtaattctgtaacggaagatactattttttcaacggaatctgattttgaaaatactggtaaacgagttactaaagataaagtaaacgctattttaagactaaaaatgatataaaggcagtgtatatagatgagtaattttgaatggttaaataatgattctagagtttttctagaacgtggttatttaagtgatggtgaaacaccagaacaaagaattaaagatattgcagattatgctgaagatattttagatattgatgggttttctgacaagttttatgattatatgagtaaaggttattattccttatctagtcctatatggtctaatttcgggaaagatagaggatttagtattagttgttttggtagttgggtagatgatactataccatcgatacttaatactgctagtgaagtaggtatgatgagtaaatacggtggtggtacaagtggttacttcggtaacatcagacctagaggctcagaaatcactgataatggtgtaacaagcggttccgttcactttatgaagttatttgagcaaatgacggacacaataagccaaggatgttatgatgataaaactgaaatactcacagagaatgggtatgaattattatctaatgtagttagtagaaaagatggaacaaaaattgcacaggtaacagataatgatgaaatagagtttgtagagcctacagattatatggaatttgtacctgaagataatgaattagttcattttaaagatagtaaaaatattgacttattagtgactaagaaccataatatggtttttaaatacagaaataaaaggactaataaagaaacaggaaaaagagaaagtgttttagtacctgagtatagaaatagattagcagaagatatgccattacatagagacgtttatttagcacattcttcatttgctaaagaaggcagaggactcacatttaaagaacgtcttttggtagccttgcaagcagatggtagtattattaaaaaataccctaaatctttgaagtttagatttagtaaagaacgtaaaaaagatagactattatggatattagatggtctaggagttgaatacacatataatgtagacaaagacaataatcataatatttatgttaatatgggtgaagaattacctaaagaatttagtaaatgggtaaatttacaaaatgtcacacaacaatgggcttatgattttattgatgagttgtctcattgggatgctagtagaagaacggataaatcatttatctacatgagtgtggttgaacataatgtagacattgttcaagccatagcttctatggtaggttataaatctcgtaaatcagttgatttaagggaaagagaacctaataaagccactatgtataaaatatatctatctgaaggtcaattatttggaggctcaaatattactgtggaaacggtacaatataaaggtaaagtatattgtgttgaagtacctactcataaacttgttgtaagaaggaaagggcatacattagtttgtggtaattctacacgcagagggcgttttagcccttatctacctatagaacacaaagatattgacgagtttttagagattggtaccgaaggtaatccaattcaaaacttaacacatgcagtaacagttactgatgattggttattagacatgattaatggggacaaagaaaagagaaaaatatgggctaaagtattaacaagaagaacacaaataggatacccttatatcttctttcatgataatgcaaatagtaatacagtagatgtatataaagacaaagggttaactattaataactcaaatttgtgtaaaaatttgcacctttagtaagtaattactatcgaaaaatccatctaaacggtgaatatctaagttaaaatatacgacaacaccgtgctaaatcagattataaatctgtaaatgcctaacgactatccgtaacctattcacataagtgaagggataaggttagagccaagtggtataagtattgagtaataatcaagtaaatcttatttaaatcgaaatggtggacttccttattaaggaagatgatatagtctgctctatatggaaacatatagaagttcatattaacaataataattaagagggtcgaaaatggagtaccatatttataaaattacaaacaaaaacaataataaaatatacatcggaattacatcaaaaacagttcaacatagatttaaaaatcatattagaaaagctaagataggctcaacaactaatttacaccaatcaatgatgaaacatggtgaagagaatttttatgtagaagaattatacacttttagtacagaggataaaaagtttgcttacatggtagagcaaatttttatagacatgtacgaatctgtaaaaaaaggttataatatggagataggttttgggtggaatataatggatagacgaggaaaaaacaatccgatgtatggtaaagaaagcgctaatgctaaaaaagttattgttgatggcgtagtttataaaaatatgggtatatgctctgaagagctaggaataaacagaaatacattaaccagaagatgtaattctgaaaaattccctaactataaatattgttaattagagaactggtagtgattaacgaccactattgaacatgtaggagtgaaattatgttacctaataaagaagattggtcatttgtatgtgacctatctagtatgaaccttgttaagtatgatgaatggaaacacacggatgctgtagagacacttgtttactttttagatgctgttatgtctgagtttattagagacttagaatatctaagagactcagctgaaaaagataaacaagaagcatttaaatttatggagagagcttataacttttctgttgagaacagagccttaggaataggcgttcttggatatcattcatacctacaatcaaaactcataccttttgaaagtattaaagctagtcaaattaatgaagagatatttaaattattaaaagaaaaaacttataaagctagtgagcagttagctaaactttatggagagcctactattcttaaagggtatggtagaaggaattcgtgtttgatggcggtagctcctacgacttcgagctcatttatcctaggtcaagtttctaaatcaattgaaccttttatgagtaattattacgttgtagacactgctaaagtaaagaaaactatgattaatccttaccttaaaagactattaaaagaaaaaggaaaggacaataaaaaagttattgagagtattagggacaatgatggttccgttcaacacctaactttcttaagtgattatgaaaaggaagtatttaaaacatatggtgaaattaatcaatataatatattagaccaagcttctacaagacaaaaatatattgaccaaggacaatctataaacattatgattaaccctaaacatgttacagcagaggagttaaatgaactttatctctttgcatggtctaatggtattaagtcattgtattatcaacatggtacaaatgcatcacaacaattcaatttatctaaaatttgtattaattgtgaagcctaaagaggtgactaaatgaataaaaaagaagcgtttggattactaagtagaactgaagatatattcaaatcaaatgatattttctcacaagtaagtaatgtacaagaccctattaagatgtttaatagggaagatgatactaaagcagatagtaaatcaagtaaatttcagctagagtttatttataatacatatgtatacattcttatatacgaaggtacattgaagttatttaaagctgatggtatggtgcagttaacacatgtagctgatattgaaacatttaaagatattattgacacactagaaaaggatgatacagaaaatggaaaaagtgaatagtttattagagttaaatacaacaatcagacaaaaacaggatgttattgtcatggttacacaagatgagtgtgctaaatgtgaaattttaaaaagtgtgattcctcttttcgaagaagaaggagatattactaaacctgtttatgttattaacttagatgataaagatgtagatagagaaaaagcggtcaagttatttgacattatgagtacacctgtacttattggatataaagatggggaacttgctaagaagttcgaagaccaagtaacacctaaaaacttaatggaattagatttactttaatttgtaattacctactacttatgctatacttatattagtaaaaggtagtaggttttttcatgaaaggatgaatagttatcgcaaaaaataaaacattaactatatataatagtgatagatattttaatatacatgtaaaaaacaaagatgaattatctaaagctattaaagttacaactttaaatgaagatgagatagaaaaagatatggatatcttagctaataaatcaactaggtatatactaagagacgataaacattacatgctatttaatgagaagtataacaatgataagttgattgaaaaaatatgcaagcacggtggacaagtgacatactatactgattcagtagtaccatactatgtgcttaaagacttatcagcccaccctaaatcatcagttgtatatagaatgcgtagtaaattcaataacaaagagatggataatatagccttgagtttcatgggaacaaaagtcattattgatatttcagttgtatttccttacgtcaatccttacgatattattagaagtttatacgatgttaaaacgaatgtagacgaggttcatctatcattccctcgtattagttctatagacgctaaacaaggtaagtactacacgtatgataaagaagcttataaactaaaacctaggtatacgcttgactttgcagacaaattaagggtttctttgtccgtgtggaaaatgtatatctatattcttgctagtaaagaaaataaagattatgaaacaatagaagacctacttactgaattaaaaagacaaagaaagattaagatttaggtgattttgtgagtacagcaaatagaagagatatagcaagaaagatatctgagagtacagggtactatatccaagacgtagaagagatactagaagcagaaacaaaagctatttctgaattgttacttgaagattatgataaggtaaagaatcataagtactttcaaatagaagtagtagagcgtaaaggtaaaaaagcatgggatggactaaataaaacatacttcactttacctaatagaaaggcactaaagtttaaacctttgtctgaattagataaagttatagatgtattaaacaaagaggaagaaaacagttaaatattttatatagcataagatttagtatctattcttcatgtatttagttggtagtatatgtattgctattatatactatttatttaacagagattgagtcaagtataaacttgactctttttttatgctatgttatagtttaaatataaggagatgattaaatatgaaaatgaaagatttagataacttacattaagaaggatattaaacaaaagaaaatactagaaatagtaaaggaaaacccacaatctatcacaattgaaaatttaaatattaaaggtatgatgaaaaataagagattgtctaatagtttccaacaaataggattaggctacattattgaatggctcaaatggaaatgttatcaatatgatatagaactaagacaagtagatagattttacccttcaagtcaaatatgcaatcaatgtggaaatagacaaaaaatgcctttaaataaaagaatttacaaatgtgataattgtggtatgatagaagatagagatataaacgcaagtattaacttaaaacaagcaaaagaatatacaatactattataaaagaaaaagagaagttacacggtaggctatatcggaattaacgctctgggagaggtttttagacctgattgttaatacaatcaacctcgttgaatagagaaactttctaaatatacatttaagtatgtttttagtagcaggattaaattcctctttttttattgactattattaatagtcatgttatactgtatttaagttaaagaagggattggtaacagtatgaaagttttaattttatatgaccatattagagaggagcacttttcagttagtaatgatggtagtgttaagaatgtactattaaatacacctaatggtagagtactaaaacaactattgtctaatatttctggtattaatcgagataggagtacaaaggattatgacattgattttttatatcctaaagtacctacacctattaagaataattatggtaaaacaattaagtaccaagacgttaagttatctgaagttaaacctcactatgaaagaatgaatcaaataattataaataataagtatgatattattattcctttaggtaagttaggcgttaaatatttattaaacgtatcagctattggtaaagttagaggtgtacctaataaagtaactattactagtgaagataaaaaacatgatgtttgggtattacctactcatagtatagagtacacaaacgttaataagaatagtgagcgtcatgtagtagctgaccttaagttattaggtaagtttgtagaacaaggtgaagacgtatttaaaccaaaagaagttgagtacgaacttgttacaaatattgaacgtgtaagggaaatatttaataaagaagtaaagaatgataatcatgatggtgtagacattaccgcatgggatttagaaactaactcacttagtcctgatagggagggaagtaaacccttagtgctatctatgagttggaagaatggtcaaggtgttacaatacctttatataaatcagactttacttgggagaatggacaacaagatattgatgaaattctttccttattaaaagaatgggtagctagcaaagaagacattaaggtactacataatgctacttatgatataaatttccttatggcaacgcaaggtttcacaaactttgaaaataatcaagacactaaggtaggttggtatttagctgtaacacaagaacaagcagagtctctaagattatcagaccttgcttacgaagtaacagatgtaggaggatatgacaaacctcttgaagattttaaagagtggtatgtattgaagctactaagattcttatcagataaactaaaagagattaaaaaagaaaataaaaaagttgctaagaaagaatataacataaaatcaaatgagtatgatacttggttgaaaaataaactcgataacattgatatagaactaacagatgaagataagtattatggtatcacagaagagcaaaaaagatatttagagttaaaactaacacctgaggttattacaaagaatatgcttatggattctgaatttaaagaagtagccgaatcatcacctgagtatatgagtttatctaacaaagctaaagattatgtattaggtacatctattaatttaattaacacgtataaggacaatactaaagttattaatgaggtagatggaggtgactttaattatgattggattccattagagcttatgcatccttatgccagtggtgacaccgatgtctgtagaagaatatactgtgatgttattgaaaagttaaaagaacaaaatagacctaaagcattggacttaatgtcaataagttaccctagattaattagaacattagctagaatacaatcaaatggtttacattgtgacctagactacatgagtaagaatgatgaattttatattaatgagatggaaaaaactcaccaagaaattagagaacattgggctatccaagaatttgaggagactagatataatttatatcaattagccttagcagaacatgagaagaaaccatctgatagggataaagaaatacatgagtatagagctaaatttaaagatgaaggttggaagtttaaaccaagctcaggtgaccataaaggtgaaatattgtatagcattttaggtatacagttaccttatagtaaagagacagttaaggataaacctttcagtaatggtactaaagaagatgagttatcatggaaagattacaaaacagatactaagtctataaagatggcattatctttggttgagaatgaagataataaaaagctactagacttacttatttattatgcctctttgcaaactaaaagaaattcttttactaagaaattacctaaaagagtaaataagaatacacataatttacatggtaactataatagtacaggaactgcatcaggtcgattaagtagttcaaacattaatatgcaacaattacctgctcatacatctgatataaataagtttgattatcaccaccctattaaacgttcttttatctctagatttaaagatggtgtaattttacaagccgattatagtgccttagagatgcgtattacagcactatatacagatgataaagaaatgttagagatgtttttaacaggacaagatattcataaaaatacggcaagtattatgtatggtaaaagtatgaaggacgtaacagcagaagaaagacaagccagtaaagctgtagcctttggtttaatttatggtgaatcggaattttcgtttgcaggtaaaaataatatgacagttgatgaagctactgaaatatttaataagttttattctaataaacctgctattaagaagtctatagatgaaactcatgagtttgttcaaaaacatggatatgtagaaacaatgaatggacacagaagatatatacactcagcacaatctagagataaaaagattaaaaatgagggtcttagacagtcctttaacacgattattcaaggtacaggtggttaccttactaacatggctattacttatattgacgactttattcaaaataagaatatgaaatcgaagttagtagctactgttcatgatagtattgtagtagactcacctcctgaagaagttaatattatggctaaagttattgtccatgtaatggagaaccttccttatgatttcttaaaaataaaaattaatggtgagttaagacagtatcctatagatgcagatatagagataggattaacatataatgatatggtagaatacaacgaagagttaataaagcaatttaattcgtataaaggatatattaagtataaattagccttacaacaaatcaaagactactatgaatcagataaactaactgaggagcaatacaaacaaaaaacggaatatattaaaaataatattgacagttttaaagttatatagtacagtaaaatagaggagggtattatggagatacatttagatacattagatttcaatgagttaaccttaaaagataacaatggaaacactcagacttttaatatccatgatgagctaaaacttagtgaatatacgattcaagacgaaatgtaccaacagtcgtctaaatttgcatggtgggcttcattaaaagagcgtgtgagtaattatgccgaagcagagcaacgtaagctagaaaaaataggagctcaacttaatctacaaattagagctcaatatgaacaacagggaaagaaacctacaaaagaccaagtagagtctgctgtatttctttctgatgaataccaacagcaagcacaggttgtagaagcatggaactatagagaaaaacaattgcattacattgtaaaagcttttgaaacacgtacaactatgttagtacagattagtgcggaactaagacaaacaaataaaaatggtggtattacgaatccatttacacattaggtattgacaaacaaaagaaaacatgttatactaattaagtaatttttaaaataaaaggagaaaagatattatggattttaatcaatttattaatcagcaatcagaaaagctacaatcaagtggttttgacaatgagatagaagtatacaagccaaaacaacccgttttgcgcttaggtaaagtaaaagatgctaacggtaaccaaatcaataaagagtctgcacttgtacgtgtactaccgcctgtagaaggttctaatgagttctttaaggaatttagaacattaggtattaactatgttaaaaaagatggggcacaaaagttctctatgcttactttacccgagaaagttaactcatctgttgtagactcttatgttgaaacatggctaaagcaaggtgtacaatttagtaacttccctaataaacctgcacgacgagcatatattcatgttattgaatactttaatcaaaatggtcaattagttcctaacacagatgaacaaggtaatgttattattcaacctatggagctatctaatacgggtctgtctcaattgattgatcgactaaaagatagaatgttatcaccatcacctactgctacacacagctttatttcagccgatgatgcattccctattaatattgctaaagctaaaaaaggtgaaaaatcatggaatgtaactgtttatcctacagtaaaattaggtgccttacctcaaggttgggaacagcagttatcggatttagataagttagctacaccaacagaagaaaataaccctaactttgtaaactggttgattaacaatgttaataacacagaagtttctcatgataattttaaattcaatagagaaacaaacacattagttgaagaaccatcaacacaagagcaaacacaagctcctacgcaacaaagtgtagagcaacaattacctagtaatttaggtggacaaaataacacacaaccaaactttaataatgtacaacaaccaacaccacaagttcccccacaacaaaatacacagtttggtcaaggaacacctgtgcaacaagcaccacagcaacagacatcacagcaaccaacacaacaagaacaaagtaatccatttgagaactttgatgctaataacattgacgattctcaaatcccattcaacacaaatgaatcaacaccagaaccacctaaacaaaatcaacctaagagtgtagatgatgtattagcaggtttagatttataataactttatagagtgctatcttagcactcttttatttaaatttcatataaaaggatgatataatggctagagcaaaaaaaggtaaagaagtagatactacaaatttaaatactattgacttaggtaaagaattaggtttaactttactatcagatagtaatagagcagatattaagaatatcattcctactatgattccacaatatgatagaattttaggtggaggtattcctctaggaagacttacagaagtttacggattaactggctcgggtaaatcgacctttgcagtacacttatctagagtagcaacacaattaggagttattacagtttggattgacattgaaggaacagcggataatcaacgtatggaacaattaggtgtagatgtatctaaattgttctcagtacaatcaggtgaaggtagacttaaaaatgtgactgaattatcagtagaaactgtaggtaaagaattagaatactggattgacactttcaatgaaaaagctccaggcgtacctattttgttcatttgggattccctaggagctacacgtacacaagatgaaattgatgcaggagtagaccataaaaaacttggaacgaaagcgacaagtacacaaaaagtagtaaatgctatttcacctaagcttaatgatacaaatacaggattaattgttattaaccaagcacgtgataatttaaatatgagtaatccttatgatgaccctattaagtctacaggaggaagagcttttgaacatggtgctagtttacgtattaaagtatctaaaggtaaagaatcagaattaaaacagaatgatgctatgacaggtaaacctacgtataaaggtcatgttatgcgtattgaaactaagaagtctaagctatctagacctggtcaaaaagcggaagttgatttattatcaggttatgaagtaggttctgatgaagatactattcaattaaacggtgttgacccttatcatactatctataaagaagccgttgagcgtggtttaattactaaaggaacatggcgtaattatgttacgttaaatggtgaagaaattaaaaaatatgataaagattgggtaccgacattaatggacaaccatgaattatacttagaattatttagtagagtttaccacgagaatttccctcataagtatgcacctttaaacaatacaaaagtagacactactcaattagaagagtttaaagcattacaagattactacgaagagcttagctctactaataaagagactaaggaagatgtaaatgaataatctaatagatagaaatattaatagtgttaaagaagcattaggtagggctaatacaaatgatgtattgcccttaccttatattgaaatagcagaacgttttaaaaaagctagagataataaggagcctatcattgtagaagaagcaggtttcccttacactgattctacagttatgtatattgagcatgtagagtcaagatgggcaggaggttactctttagtacgttataatggttctgaagtcaaagtacctaaaacaatacactattctgatatctatgtatcaaatgatgtacataggattaagattgtatttgaaggagcacacccttatgaagaaagttaataatgggaatagatatattatagacttagatggtattcctactgactttggtagagatttagatatgcttttaaaaaggtataagaaccttagatggtcattatttcataggtactctagaggtatgagtcatgactttgagaaacaagagctacgggaatacatagatgagcagtttattaagttagttaaggagtatgatatacaaagtaaagtagattttccagggtatattaaaactaaactaacactacgagtacagaacagttatgttaagaagaacaataaatataaacgtactgaacttgtaggtaaaacagattatacagtagagtccttaacacaggagttaaatgtgggattagaagaaaatgaattacttaattatgtctttgatgatacacaatttactgaagtacaaagtgaactgctaaaagagctccttattaatacggataaagaagacaacgcatttattgtgtctactgtagctaataggttagaggtagaacgttcagaagtagctagagagcttacagaacttaaagattatgttaaatttaaaattaatgcttatcatgaacaaaatgccaaaaggtatatcaaagataataaagtagataagcaaaatcatatgtgggaataacctgaataagcctcccttttgttatattattagtgaaaaaataataacatagggaggttttttctatgttatagcataaaaaataatgattggagcttaaattattatggctaagaaaaatattaatgaagtattaaaacaagctactgctacagtagcagataagtatttacaagttcaagtagagcaagatggttatacacgtacacaccgaggtcagtataactacaaagtagtagataataagggagaattattcttatacccgattgaaacagatggtagaggaaatattaaaattatgaaaaaggctcctgttgcttatacagatggagaccaaattcattttgtagttaatactgttaaagacccttacaaccatgcttttattagaactgaaaatattaaaggtaaagataaaggtaaacaattaattcaagcgtttttagcattcgttgaagaccgtttcagctttggagtatacaatgtattccttgctaataacaagaaggatgtttttgctttagttgatgctgaaagtaaagatgctaaaaaagtagtagatagtaatgagaaacctcatgaagacgtgagcgctgagtttcctgctagtccgctacgtaaagacgttaaaggagtagactcaggagaaggtcaaggagatacttcagaaccttcagtacctaaaaatgtaacagtaacagctaaagaaacaacagctgatattacagctgaataattatataaaggatgacttagtttggataaattaaatttatacaaaggtgaccagctattaaaaagtgaagagaaacaagcaggtaaaacatcaattacaattgataacttaactgctaacacagactacccacaaggtacatataaagtatctttctctaatgaatcaggagaatcagaaaaagtagatgttcctgcgtttaagactaaagatattaaagtagtatccgttactttagatgtagaaacactagacttaaaagtaggagaaacacataatttagtagctacgattgaacctagtaacgcaacaaaagctacttatacatttacttcagaacatgatgatattgccagtgtatcaagtaaaggtttagtagaagctaaagcaaaaggtcagactacaatcactgttacaactgatgatggtaatcatacagatactgtaactgtagttgttaaagataaagtacctgaagctcctacaaatgtaactgtagaccctaaagaaacaacagctgatattacagcataatcggaggtaaaaataaatggaaaaaacattaaaagtatataaagatggtgaagtagtaggtactaagactgctgaacaaacaggcaaaacaactatttctattagtggtttaacagcagatactacgtatcctaaaggaacttataaagtagcatactctaatgagtctggtgaatcagaaaaggtagatgtacctgaatttaagacatcaccacatagtgagctataataaattaaagtccaacttaattgttgggcttttttttattgacttatatttatttatatgctatagttaaacaagaattaataaaggaggtactatatggatattaaaacagtatacttaatttcagataatgaccatttgaaagttaaaaaattaatggaaaataaggaaaagtatattgcagttacgtatgataataagtcagtaggtaaggtcaatatcattatggttattaatgttattaaagacctagtgcatatgtataggtataaaattgttgagtatgggttatctaataatgataaggataaggaaatggtagggtatttaatagaaaggattgaggattgatgttatttattttaaatgaagtagcttcacatacagaacatttatccgaaggtatagatatgttcgacgttgaaagtgtgatatcttttgactcggcattacatttagctagtgataatacgtatgattctgttatttttttaggttttatatacaataatgaggattacttaaaatataaagaattattaaaaggtacaaaattatactttgtttctaatataaacttacctgataacaaagattttattacagtaggtaatgatttaaagtacctatccttattagagcaacttgtagtattagaagataaagacctagacattaactttagtcggtatactaaagacacggcttctaagtacactgagttgtttagctttaaatctacttatgaggaggcaaaagaaatgggtctagtaggttaccctgcagatatagtattacctattatgactgacaagttttacaacgtaaatgatttgtatgtactatatgaagtagcacctgagtataaattacctttagcatatgaatgccttaaggataaagaaaaaggtattgttgttataggttcacaaacaagaggtactagtgatatccttactttctatgtaaaaggttatgatgttaatagtgttgctaaaacattcggagcatcttataatgaaaattctaatatattcagtatatttattgatagtcatatccatgtgttaggtgagaatatgaataagtatttaataacggaaggaagtatttatgagtaattataaaacagtagaagagttacaagcagttattgtaggtgtgtttcttaaagatgaaggtaaagtagttacctctaaatttaataaagtattatcaagttttggtattgatagagtaaatcgcaatgaattaaaagatattgtagataatattaggaaagacacatacttaaatgacttgaaaaataaagcagttaaaggtgaagtgttattagaggacttaagagatgtagaagataaacaagtatttgagggtaatgattatcatgaagaagtatcatcttatgtagtagcacatgaaaaagaattatcaagactaagagaattacgtaagattaacagacaaactgcttatcctacaattttgtttgatgaattaaaacgcactatggttaatgagcttaaaggagataagttattagaccataaagtaagtaggtatgcttctaccgaggaagaagaagagttggttgtcttactatcagattttcacgtaggatgttccttccaagatttaactaatgaatataactttgaagtactaaaaagaagattaaatcagctattacaggaaactattaaagatattagtaaacgtgggattagtaatgttacagtatactttgtaggtgacttaatagaacatattaacatgagagatgttaaccaagcttttgatactgagttcactatggctgagcaagtagcaaaaggaactagactattaattgatttcttaaccgaattatctccatacgtatggggtaacttacgttttggtatgatagcaggtaaccacgaccgtgtacaaggtaataagaaccaaaaagtatacaatgatagtgtagcttatattgtattagattctttactgttgttaaaagaaaatggtgtattagaaggtattgagattatcgataatagaaaagatgtatacactattaaagatacagtatgtaacttaaatattattataaaccatggagatggacttaaaggtaaaggtaagcatatacctaagtttattgagaacacacatattgacttattaattacaggtcatgtacatcacttttcagtaacacaagaagattacaatagaatgcatattgtagcaagtagtcctatgggatataacaactatgctaaagaactacacttatctagaacgaagccttcacaacaactactatttttaaataaaaaaaataaagacattgacattaaaactgtattcttagattagggagagataatatggacattttatcaattatagccttaacattgcttatcattattattgttaataccacaatgaactttgtaggtatgttacgtggtgagcgtgatttagtaaaaaaaggaggtaaccctctacccaattggcagtactataatgtgctactacctaatttatgtggtattatactcttaggtattgttgtttattttggggattcgatttataaaattacaacaaggatagaagttctttttgctattattgcgcttattgtaatagatgtattgttaacagcgttagtattattagtattgagtttcgtaacaaaaaataaagaatagtaaagaagggagtccagtttatacttgactccttttattattcgtggtatattagatatgaggtgatttttgttgcaattaaattttggtaaatttgataatgaaattattaagacaaaagtaagtgaaggtgtttactcttttagaggtgttccttattactacatagaacatgtccaagatgaaacttctgagtatgtattagtatataacatacatagtgttgatgatgaagtaccacaaaagaaatataaaatagaaacagtaagtaaaactattagaggcggtacgatattaagtaatacaattaagtcaatgctacctaataataagaagtataaaaaagtatatgaacctcctatctttttagctaatattatacctttaggtacagatacaactacaggtgctgtaggtaaagggtttttcgaaagagaaaaagatagagtaactattacacaaaaagaaggcactaaagttatacatggtgagtatacaggagtatttatatgtttatctaatgttaaatggattaagtcttatacacctttagatagtatattacaatattatcaacgtattaaaggggatagaataaatgtctgagataactaaattttatgagcaggacattaaagatttaattagaacgaagagacacatgtttaaagatgatgagataacaagtaatatacaagatattagaatatttaatgaaaaagctatttgtcaaggtaaatgtagaactgactgtttaattcttgatagaaatggtactgttatgggtatagagataaaaacagaacgagactctacacaaagacttaataaacagttatactattatagtctagtatgtaagtatgtttatgtgatgtgtcatgataagcatgtacctaaagtagagcaaatactaaaaaggtataaacaccatcatgtaggtattatgagctatattaactttaaaggcagtccagtagtaggtaagtataaggaagctacgccttcaccactaagaagtccttatcatacactaaatattttatggaagcaacatttaatgactatacttaaacagttaagagattataatacatacctaactggatataactatagggagcacggtaaaaatactaacaatgaaggcagttatatagaaggaacacaacgtatgagaatgaaaaagtcagctattattaaccaagttattcattatttaggtgtagagaactcttataagatatttactagaggtgttatctatggttatagtaataggtggcagatattagaagatgatttctttaaagtgatacagaacggagtgagggtattatatggcaaagaggaaacctgatgcatttaaacctaaatctaacggatataaacatcaacctgttaactttgctcctacaggtaacctatcaggtagaagtacttctttttttaataaaaaaagaaaagatataccagatgaaagtattgttgttaaatacaaacctttgtttgttaaaaggtttgataatgttactgctacagacattaaaatacaaaagaagtatgcgttagacttaattagtgaagctgtgaatataaagaagaagtatcttgtaatgaagcaaaaaggtaaattaacacaaactattttacatacggatagagtttattatgtttatagaggtaagaaattaataggtaaatgtagtattcgtgaacaacgtacatttagaggtacacatttaatctatatttttagtactagacatagaatatctgtacgcaaaaatagtagattaaataagaaaagaacaccaaagaaaatgatatataaaggtggtaaataatggttaaatacttaagaacaaaagctaaaaaaacaaatgtaagtactttatttaagaaactacaaagtaaagatattacactattaggagtgtcctatgatagtgattatttccctagtggtgtaacaatagtaccttatttagaggacatatcacaagtagaagatggtatagaatttacgaataaagtaatcgttactgagaacttaaaacctgccattgtaggtatgaataatatgataagtgaatcagggttaggttacgttaaaacagaacagttaaataaaaggttagaaaatactggattaatgacagacttattatctaaaggaacagaattaacttcaacaaagaaagtagacattgtatcaacttttattgaacctactattatgtaccaaaatactactattaataaagaattaaaacttagattatacactatcgaagatgtatctcctttaaatgattacacacatgttgtatacttactagtaactgataagcaatatgacggtcaatcattcataggtacattatgtaaccaaggtacattaaacaaattagataccctaaaagttcttacattattcaaaggtaataaattaatcaatagaagtgtgttctctgttaagctagatacaaataaatatcattatagtttatataatacacatgagaccggtattttctttttagatgatgataaagacttaattattgcttgtggtcaatcctatgtaaaagttagatataaagatattgttagtagtaaagtagagaaagttagtgataataactataaaatgattgttaatcttgttggtaatgatgagctaacaattctcttatagtataatactcccttaaatatgtatactaaggtataaatatacgtatataagggattttttatacatattttttcaagtagttagttaatttttaaaaggtattattcttattttaaaattatatttataaaacattaaaatacctttcaggtatagggttttagaaaaaagatttatattgcttaaaatatttacaatgtagtgtaaaaaatcagaatatcctttatgaaaataaaatagatgcagaaattgtgatatattatataatgtaaagtataaaatagttgatttgataaggttatgtgaatacatatactccttattttagttcacacatatgtaaagacacttgagacaagaagggaatatataatggctagaaaaaagaatttaagaaataaaaaatctgatataaaggtagttccagataaggaaagtattctatctaaactatataataataaactattaaggtctaaagtggataatgctatagatgaagatgttagttatgatgatattatagacctatgtaaagagtatgacttagagttatccaaatctgccattacaagatataagagtaaacgtaaagaagctattgaaaatggatgggatttaggagaacttattgataaaagaaagaaagttagcactactcaaatacagaaaaaagaaaaccctatgaaagaattagatagtgaaaattatacaccttttgaactggctacacagaatgtacaaacaatatatgatgatattcaaatactagatatgattattcaaaaaggtgctaaaggtttaaactttgtagaaacattagaccctgctttaatgattaaagctatggaaacaaaagatagaattacgggtaaccaactaaaaggtatgtcattcataggactaagagaactaatgattaaacaacaagcacaagatactgctatgacagaagttattcttgagtttattcctgaagataaacatgaagaagttcttcaaagaatggagcaattacaagaagagttctataaaaacttagatttagatgaagaaggaagaaagttaaaagatacattagatagagtaggctatacaatatagataatgaggtaatacatatgacagaagaaattagtttagttccaataaaagatgttaaaccacttacagatatagtagatattataacacacctacataaaggtgatgtacttagagttaaacaagagaaccagggagatatattacttagactaagtactggaaaacataagtttactgaagtgtcaagagacttagataaagaaaccatgttctataaaaggtattgggtactgtataatgtatctattaattctttactaacttttgatgtttatttagaagacgattatgtagaatctacaaaagttaagttccctaagaacacaattgtagaatacataagagataatcaggaaccagatgtagctaaggttaaagatgttttagtagatagtaacggtaattatttctatgcactttcaggagaaacatctttatataatgaagataaacttaataaaattaaaaattaatgattgacacactcatatgggtgtgttattcttttattacaaacaataaaaggagcaattgattatgattattacattaaatgaagaagagaaagcattattagaaaataaaagcaactatacgccattaagtaagaataaagagttcaatacaccaaaagaagaatatattgttacaagttataataaaggtgtacctgtgactgatattgctaaggaagctaaagtaagtatgggtttgatttatacagtgttaaacttctataaagtacctaagaaacataagaaatctagagtagcaaaacgtgtaaaacatattactaatgataagaataaagtacaagccttaattaaagattatcaatatatggacttacaaagtatctataaaaagtataacattcataagaatggtttatattatattttagatttgtataatattgaaagaaaatcagatttaaaagagaaagccttagaagatactatcgaggtagaataagaggtgtcatatgcgcaaagaacgaattgtagattacttgtataatgtaaagaacattgataataatttaactatacaaggaatagaaaatagtttatttaacaaagaatctttacaagacttagtacctgattttgatacttctagtagagagattaatgaaagtaatttatacctatgtacaataccagaagattataactccgaccacgtagaaagtggtcagtatataggtatagatgttgggtatgtatctgaagaccctgcttttgaccatttaataggtcaagttcctagaagtgtatatgagaaagcgcatgttatgcaaccactaattaagatagaaaatactgatatagattatacccaggctgatatgattaatgatattaaagtaggtacaagtattagtgatgtaaagattaaagataaattaagtttaatgtcaaataatcttattacacatttagaaattgttgataagtattactttgatagtagtatagaagaaacattattaaagtattatgagttaaagaatcctgactattatttaaaacattttcttaaactaaaagaacttgtcggagacaatagaatgatatactgtcctctactgttaaaatgtattaaagttatagactaagttattatattataagtagtaaaggatggtgcgctatgagtaaaaaagcaataattgcttatgtaattatcttagttatgttagctttatctatatctacttattacgtgtcctcatatttatatcatgaaaaaaccaaatcacaagttacagaccaattaacacaccgcggtaaattaaaaaaagataaaaatgtagagtatgtaggagactatacgcttaagaaagtaatagacaacaaagcatactttatggaaaaactacctacctatttaccaggaagaacaagtgataaaagtattgatatgagatattataggactagtaaatttagagaaggtgtaaactttaaacttattcgtgtgtatacggaggataatgacaataatccagtacataagtataggtttgaagcagtactaaataaaaagtaaaggtatgatagtctatgacagtagtaattatactagtatgttttgctattatatactatttatttaacaaggattgagtcaagtttatgcttgactctttttttatgctgtgttatagtttaaatataaggagctgataaatgatgaaaaaaagtgatttaggtaatttgcatattgtggtcgtaagtattaagaatggtgttttacctgatgagcgtataattccaattggtttagatgtactaagtaaagtattagagggtaaaactatatggacagttaagaaagaaattaaacatacatttggtaaagatgaattaaaaatatttaaagataattacaagttcttgcaacataaaattgtagaccttgctacaaaaggatataggtaggtgatataaatggatatagtagataaactcatgttaggttttattttattgttttatgtaggtgtatttatttggtacttatgggaagtctggaaattaacttctttaatatctgatatagttattaagtattatgttcgtaaggggtgggttaaaggattactaccttatttgattcatcaagttattattacgttagtttgggctactctagtattagtaccttttatacttagttatataatgatacaatatttgataggaggttactaaatggaagtagtatatgagaatgaatgtagaggatattatatttgtgtcatagataatgaaggtaagtatgaagtatcatcttttaaaaaatcagtaaacaaatatacccctgaaattatagggtatactacagaaaagttactcttggaattaaaaataccatgtacatatgtaaatgctagtgaagtagaaagttttatgcaagaattaaaagtagcacgtattgcgcttgacaagtttactaaagatttatataataaaggcataacaaatattatattctaaagggtggttagtatgtatacagaaaaatatagaaatttaatccatattacacatagtatcttggttagtattcaagaattagcaagtaatttattaaataaagaagtaaaactagttacaaaagaaaataagtatttatgtgttgtagatggtattattatgttaattgttgaggaaggattagtatacacctattttgataaggtaggtttaaaagtgcctgaacgtattgcacttggtcatttagcaaaaagtttacagtttacaatatcagaatcaaataaagatttagaaaatcaaaaataagtgttgacacctttaacatgttgctttatactaagagtaacaaaacgttagaggtgattttttatgtgtaaagaaaaagttcatagacagctatctaatgctatagaaatattagcaacttacaaagagtggtggtcttttccaaaagaattaagtcccacagaaacatttaagattattaactggaaagaagatacattagtatttgaagttagagataacggtaattatataggtaggtttagtgtagcaactcctattattgactttcattatgatagaattaaaaaaacgacagcacaatacatgataaattattttgctaaactagtatgtaaagatatgtatacgtattataaattacagagaggacagtaaaaatgaaaaatttaaataaacaaaaacgcttgacgttggaattgattagtgataatctaaatacacaacataacttaaatacatcggttagtcttgtagattatagtataaaagactttacaaataagaaagtatatgtaagaactaaaaaaggtttagaacttactaatatgaaaagtttaaaaagtactgagtcattagatttattatttaagtatctagaattaattttaaaaggagatgtataacatgctaacgccagaacaaagaacacaattaaaagagtatcaaaataaaatgacaaaaaagaaaaaataaatgttgacttactaaataacaagttgtataattaacttaacaaagaaaaaggagattgataaatatgaaaaacttatataaaattttaacaggagtattctttagcgctacactattattaggaggttgtgcttactactcacaagaagatacaccaacacatgattataaagaagataagaaagaaaataagaaagatgattcatttaaagtagaagaacaagaaaataaacaaattcaagaagacaacactgttcaaaataaccaacaagataatcaagtacaaggtaaccaagcacagggtaaccaagcacagcagaacgaacaaatgcaagaagcaagcagaagtgaacataatggactatctaatgctgagtacgcagataaatacaatcagtatagagaagctcaacaagcacaagcagaattagaaaacagaactgaagcagataaagctagtggtggcggaggtgggggagcctcatggaactacgcaggagctaacgaaagttttgaccaatggttacaacgctcacaacaagaaagagccgaggcaggattacaataaaattaataaaagatacaggagaataagtatgaaaacaataacacaagaagaactaaataaaattctagcagaacataagctatggttagatagtaatagtcaagaaggtaagagagcagacttaagttatacagacttaaatgaattagaattaataaatgctaagttaatgagcgctaacttaaaaggtgctagcttaaaatattcttctttagaagatgctgatttaaggggtgctaacttaaaaggtgcggacttaacaagagctattttaacctgtgctaacttaagttatgcagatttaatagaggctaacttacaaggtgtggatttagcaggagctgatttatattatgctgatttatattatgctaatttaacagatgctagcttaaatgaggctaagttagaatatgcagacttaacaaataccgatttaacagatactaatttatctcaagcatccactcaaaacactaaaggtttaaaaatttattctatagataatattggaacttttaatggtaaagtaacttatattcctagcttagataaagtatttgctgggtgttggaaaggaaccttagaatcgtttttaactaaaggattagaaatgaatgaaggagacagtaataaactggaggaaataaaagatgcttactacttttttagaaagcgtaagtagatacaaggatgattaaatatgaacattgtagaacaacgaaaacctataaaaagtaagcatgttaatttaactaagcatgcatatgaacgttatactttaagagttagtaacgatagtaaagaacgtgcttgtcagtggtttgctagtgctttaatgcaagctacttttgaacatacacaaaaaggcggtaatgaagtatatgtatttaaaaattatagaattgttattgataagcatctaactattattacagttatagacactgaagatgataactgggaaggcataaaggaagcaagagaacaaatagatacgtatattaaaggtaagctaaaaagaactgttacacctctatttactaaattagatagaatagatattagtatccatgaagcacatatcagcatgattaaaacaagaaaccctaagacaaaagatataattaacaaaaatattgttgaacttgaaagaaataaatctttactattaaatagtatagaaggtgtaaagaaaacagcacataagtattatatagaattaaaagacatacataaaagattaaaggactgataataatgtatttaaaagatttaattgaggattatgtaaatcaagacaaagaagtaattataacaattacaagcaacaaagtaattattgaggtagactatgatgttatttgtttacctaagagtaaggttgatattgatgatttaaaagcttatgtgtacggatttaatagatttaatactgagcaaattacattaaaggatgtggagtaatggaagaactaaaaaggataacacaacctgaattagatttattgatagagaagcatgaacaatggttagctacaaatgaaaaggaaggagaaaagctctttttacagtgtgtagatttaagaaatcttgattttcattccgctgaccttcaatattcaactattgtaatgtctagtttaagtgatgctaacctaagttattgtgatttaagttattctgatttaagttacagtgagtgtatatctactagatttacaaatgctagaatgagagatactgagttgcatcatactaacttagagggggctaatttaataaaagcaaacttagaaaatgcctgcttaactgaagctaatataagtgaagcagacgctagatgggctaatatgaaaaatgctaacttaagtagggctaatttaaaaggtgcagatttcggtggtacaaacctaactaatacaacattatattatgctaatactcttgacgtatttggaataagtatatatactataagtaatgtacttgattttgacgagcatgtaacttatttacctgattatgatagaattattagtaattataatgaatatacccttgaagagtttggtaaactagaacctacacttgagtacgaagaagatagaataaaagaagtctcaaagaaaattaaactagcttacgatttctttaaaggagtgaaagaacttgataaaatttaattcagacaaacataaacatatacttaatgttatggatagattaccatatatttgttggttagatactgtagatggtgagtcaggtgctgactttttatgcgtattaaataggacacattatgagcttactgaactaggtataatgatttatagttatggtagttggtatatgataccatatgacaaagaagatttaattgaatatgcaataaaaagagatatagaggaggaaagggaatggtaggtatggtgattacatttttaattgttttaggtattatattgctaagtgtactaattattgttataccagatttaagcaaagcaaaaaaacgtaaagaagatgtagatattaactatagtcaatatactaaagacatggcttctgagtactatgaaaagtatataacacctatcgaacacattattcaaactaaagtagaagaggtaattgaaaatataaagaaagaatataatgtctctactgtaattattgactcttctagtaatgaagacaaaattatcttacatgttaacgataagtacttaaaaaaggtagtgtataaagatacgtatgaatacatctacgattctaatacaaaataccaatacattattaataatgtaacatatgagtcaagtactttattaaaacaagatgaagtaaataaattaaaagatatacttaataaagtacctgtcacagctaagcatacatttaaaaatgagttgcttaatcgtaggaatgaatatgtgttaggttatattacaatatatatttatggtgatttaactgctaaaattacaaagaatagttatgtacaaaactttagtacactagaagatttttgtggtaagtatgaagcttactgtagatttgttagaattgatttatatgactgggtaaaagaagtaagaactattaatgggtataaattaaaggtagatattaaaccttattttaaaattactgctactaaaacaagtaaatacgaatttgtagtaagtgatgatgtatctaatgttaaggtatatagagatgatatgctactaacaaacaggtacgtgcaaaaagcaattgatatacaggaaatagtagaggaaacattgaataataatactgtggtattttaaaaaaggaggaggtagggaaattccctactttttttataaataagtgttgacattgttataagtgtgggttatacttagtatacaaagttaaaggagataatcaaaatgaataataaacaattagaacaattatataatgaagcaaacagggtgttgaataaagatattgatgatgtatcatatgtaaatgcacatagaatgattaaagactttttagatttacctatcgaaaacaaagagaaaagagagacattaaaagagttgtatcttattctaaataaattttataaggtgggagaataatgataattcaaaagacatatacttgtaaagaattaatagaaaaatactttaatggttatttaaaagaaggtacttacacaggtacatccgatggcttagatacttattaccttctgttagaaaataaccgtatgactattggatatcaagtacctttggacgctagttttatagtagaagaagaaattactaatgacacaaaactagaaaactgctgggtattattaaatagtcatgcaaaagaactattcatggataacacaggtaatgtgagtattaatgattgtatagaaatatacggagatgaattattaactatcagtatcttaatcgatggtacctttattaatgtatggagaaatgatgattattttaatagaggaggagaataatgaaaacaataacaaaagaagaattaaataaagctctagaagaacataaattatggatagaaagcaatgaggaagaaggtaaaagagcagatttaagttttacagacttacgtgacctagatttaaaggatgttgatttaagagaagctaccttaataggtgctgatttaagttatgtagatttaacaggagcagatttaaggcatgctgatttaagttgtgctaaactaatagaagttaatttaacagaagctatcttagcatatgcggatttaaactatgctgatatattaagttctagcttaagatatgcttctttagaagaagctaacttaacaggtgttgatttattagatagtgatttaacaaatgctactttaatagaggctgacttaaagcgtgccttcttatcaggtattaatttaacaaacgctgatttaaggtctgctaatttattagatgttaacttaagctatgttgatttaacaggtgctgagctgtcttgggcaagtactcaaggtattagaggtttagaaatgtattctatagataatattggtagttttaaaggtaaagtaacgtacctacctaaatataataaagtatttgcaggatgttgggaaggaaatttagaagaatttctaaaaaaaggattagaaatgaatgaaggagataataaagagcgtaccaacattgtactagcttatcagttctttaaaaaccaactataataatttaagtatgagtatttcttagtaagtaataagtaggataaaatatcctacttatttcatatataagtgttgacatgaataagtgtaaggtttataataagtatataagttaaataattatagaggagacattaatcatgaaaaaaatattaagtttagttttatccgtattaattgtactaacaataatcaatgtgttgaaaaaccaagagcaagtagaacaaagtaaccaagaatctaacaaccaagagcaagtagaacaaagtaaccaagaatctcaaaataatgatgcagatgaccatacttcatacgtacctgagaataatggagaacataaagacgttagtgaagaacgtaaaagattatggggtacagagtatcaagaaggtgaaacacataacccaaatgctaaagtgtttaatcaagatacaggagaacaggttcaataaagagtaagaggagcacttattatggagtattggaaagaacaagatatatattattcaaaaacaaaacaaggtgttataagctatatagacttatcttccttacctaaaaagaagtctcgtattgattgggtaaatgtaaaccattatataccctttgagtatcatagcacgaaaggtaagctctatattaaataccttacaccaactaaaaaagaatctagagtagaaataacttacaacaataaaacccaagctacccaagtagctaatgtctataaggttaaattcaactttattacccaaggtcagaagtcttatactgttcataatataaaacaaggagatattattaaaaattgtgaagtactaaaagtagtagacactcatttaggtacacaactttatgtatataacataaaggaagaagtctatggtaaagtaagtaaacaaaatttactaaagtataaaactgataactatataccatatggtactattcctcaatctaagatgttataccataagaaacatattcataagtatgttaaatataaagacttatttaaatataagtatacaactaagaaaaagatagaaacgatttgccctaattgtaaaagaaaaaaagatattagaattacagatttaattaaagataactatagctgtcaatgctctaaacaatactctagcttcggagaaagattaacacaaagttatttagatattgcaaacatagagtatattagagaatataaatttaaagaattaggtaaaaaaagatttgatttttacttacctaagtataataccgttatagaagtacacggtgttcaacattaccaagaagtcagtggatacatgaaccaccagaaaacaaaattatcagacatagaaaagagagaatattgtaaagaaaatagtatacaatatatagagattgatgctagaaaatctacctttaaacatatattaagtaacctacaaagaacatttaaatactctaatatagatagtaaagaagtaattaaaagatatagacatgtatataggtaagtgtagaagagtaaacaaccaaacagacaaacaaataggtatagagattgatgtaggtagaagttata

SEQ ID NO: 7 - DNA, 144076 bp, Unknown
  bacteriophage strain capable of infecting bacteria of the genus Staphylococcus
tgtaagtactgatattaagggattcttcaaaataatttaaattatttttagaaaactgttgacttatttatcaatatagtatatagttaaattatcaaataaaagagaaaaggaattgattaattatgaaaagacaaaaaatgttttactcaagtttaatatgtaaagaatgtggaaatgtattcaaagtaccaagaaaaagagcaaataaaagagaagagggtcatatcaaagatatatattgtatcaaatgttgtaaaactacaaaacatatagaagataatcgtagtgaagcagaaagaagatgggatgctattcaggaagaattaacaaaagataactaatattttaaaaaagtattaaattaacttgacaaaggtatcagtatatgctataatgtaattaacaataaaacaaataccttacacatcactgtttttattacattgttttccagtataaaacaataacaatgttatcatccttgtgtaaattaaatagaagtaggtaaacgtccctacttctataattttttttgaaattaacttgacaagtaataaaaattatgttataattaatatataaataatacaactaaatatctgagcatagtgactgaataatgatttggtagtcataaggtacaagataatcaaacgaatcaaaacctatcggagatatatcggtaggatgggtcgtcattagtattgttaaatacgattggtatacttggtacttacttataaggtctgtagagtatgataacggctagggtttaatttctttctagggtcttagcggaatcctagaaagatacgctgtaacgactaactgtagttggagcacagaaatgtgttagataatagaggttatcagtatgagtagcataaatctacaggttcaaaagagctatatttgataaaaataatttggaaatcaaataaatttacttttcttcgaccatgtgaaagttattaactaatatgttaatatcacagtatttaataaacttatgaccgttttacggtttgtaagtcccttttaaattgcgtgagatggacttaaggtagctccttaatagagtcaatcgtagtgattcacttaataacaggtcttataggtaggttcctcgtgagacgggttatgcttggatatttagttgcattatatcagaatgtgactataaatattttcctctttatagtttattattaacaattatcagtttcctcctttgattgataattaaaaaagaatctacagggagtaaactttcactctttcatgtatttattgttcacactcctttatgaaccaataacttactccttgtagattatacatattaccttcttaggtaccaattaccacgttttgttcatttcacctcctttcacttaatatatagttgttatgagtggtaataatcgttgcttcgagcctaagagaaaacctgctatacattaaggtaaggttagggtatagcattataattttggctcattggtgtaactggttaacacactgccctgtcacggcagagagtacgagttcgagtctcgtatgggtcgttttaaggtttcttagctcagatggtagagcactagattgaagctctaggtgtcattggttcaaatccaatagaaaccataataaacacccttagtataattagtagtacaagggtctccaaaacccttagtctttgtgcaaatcaaagagggtgtgttttacataaatgaaatctgagaattcatatgtgcggttgacgaaccggtttgctgtgtcctcgaatgagggtaggatttcattgagtatatagcgcaagtgtttgttcctaggatacgatactagctatatactttacatatttaaaaggagagatacaaatggcatcagcaaaacaattatattatacggaaagtttagttggtaaggcaattattaataataaagtatctaataaagaagaagtttgggataagttagagctacttcctgaaactaaattagaagatttagataacaaacaaatgtctgaagttatcaaaaaactaaaccaaattaatgagtaagtgttaaattaatatagataaacatgaccgacctactgttatattattgttagaaataaatataatagaaaggtcggttttttaatggctaatgaaactaaacaacctaaagttgttggaggaataaaccttagcacaagaactaagagcaaaacattttgggtagcaattatatcagcagtagcattatttgctaaccaaattacaggtgctttcggtttagactactcagctcaaattgagcaaggtgtaaatattgtaggttctatactaacactattagcaggtttaggtattattgttgataataatactaaaggtcttaaagatagtgatattgttcaaacagactatcttaaacctcgtgatagtaaagaccctaatgaattcgttcaatggcaagcaaatgcaaataacgctagtacttttgagatagacagctacgaaaacaatgcagaacctgacacagatgatagtgatgaagtacctgctattgaagatgaaattgatggtggttcagcaccttctcaagatgaagaagataccgaggaacatggtaaagtatttgcagaggaggaagttaagtaatggctaagactcaagcagaaataaataaacgtttagatgcttatgcaaaaggaacagtagatagcccttacagagttaaaaaagctacaagttatgacccatcatttggtgtaatggaagcaggagccattgacgcagatggttactatcacgctcaatgtcaagaccttattacagactatgttttatggttaacagataataaagttagaacttggggtaatgctaaagaccaaattaaacagaattatggtactggatttaaaatacatgaaaataaaccttctactgtacctaaaaaaggttggattgctgtatttacatccggtagttatcaacagtggggtcacataggtattgtatatgatggaggtaatacttctacatttactattttagagcaaaactggaatggttatgctaataaaaaacctacaaaacgtgtagataattattacggattaactcacttcattgaaatacctgtaaaagcaggaactactgttaaaaaagaaacagctaagaaaagcgcaagtaaaacacctgcacctaaaaagaaagcaacactaaaagtttctaagaatcacattaactatacaatggataaacgtggtaaaaaacctgaaggaatggtaatacacaacgatgcaggtcgttcttcaggacaacaatacgagaattcattagctaatgcgggttatgctagatacgctaatggtattgctcattactacggctctgaaggttatgtatgggaagcaatagatgctaagaatcaaattgcttggcacacaggagatggaacaggagcaaactcaggtaactttagatttgcaggtattgaagtctgtcaatcaatgagtgctagtgatgctcaattccttaaaaatgaacaagcagtattccaatttacagcggagaaatttaaagaatggggtcttactcctaaccgtaaaactgtaagattgcatatggaatttgtaccaactgcctgtcctcaccgttctatggttcttcatacaggatttaatccagtaacacaaggaagaccatcacaagcaataatgaataaattaaaagattatttcattaaacaaattaaaaactacatggataaagggacttcaagttctacagtagttaaagatggtaaaacaagtagcgcaagtacaccggcaactagaccagttacaggctcttggaaaaagaaccagtacggaacttggtataaaccggaaaatgcaacatttgttaatggtaaccaacctatagtaactagaataggttctccattcttaaatgctccagtaggtggtaacttaccggcaggggctacaattgtatatgacgaagtttgtatccaagcaggtcacatttggataggttataatgcttacaatggtaacagagtatattgccctgttagaacttgtcaaggtgttccacctaatcaaatacccggtgttgcttggggagtattcaaatagaatagaaatttagacggatttaaaatccgtctatttttttttgcaaaaaagtgttgacaaaattaaatatatagtgtatagttatatatgtaatcaaataaaggaggaattacatggcactacttttaacatattttgctatttttattgtttttctagtccttgtaggttttggtataagttatttatttgattttctttcattgaaagaaaagaaaagtaacataagaaaacaatacagggaattagttaggcaaggtacattagatgaatacggtttagaacaatatgtaaagtataaaaaacaattcttaaatgaccgtaggcaatcaattgtaactagagccgataaacaagaaatagaccaagaggaaaaagctttaaatagcttaataaaagaaatagaaaaaggagaaatgtaatgagaaagtcagtagttatttcaggagtattagggtttttagcaattatagggtttattattttattaatgtgtattactaagattccacaaggtcatgttggagttgtatactcagtaaatggtgttaaggaaaatactaaatcaccaggttggcatttaacagcaccttttgataaggtaaataaatacccaactaaaacacaaacacataaatataaagatttaaatgtagcaacttcagatggtaaaaatttacaaatggatattgatgtatcttataaagtagatgcaactaaggctgtagatttatttaatcgttttggtagtgcagatatcgaagaactagaaaaaggatacttacgctcacgtgtacaagataatgtccgtcaagcagtatctaagtattctgtaattgatgcatttggtgttaaaacaggagaaattaaaaaagatactttagatagcttgaatgacaacttagaaaaacaaggatttgtaattgaggacattgcattatctagccctaaagcagataagaatactcaaaaagcaattgacagtcgagttaaagctaaccaagagttagaacgtactaaagttgataaacaaattgctgaacaaaatgctaagaaaaaagaagtagaggctaatggtgataaaaaagccaatgagattagagaatcttctttatctgataagatattacgtcaacagttaattgaaaaatgggatggtaaacaacctattcaaattggcggagacggaactattgtagatgtaacaggaaaataataaattagagaggttaatacctctctttttttgtatttaattatctgataactgtaatgtttgtaataaaaccttaataatattacactaattagtgctatattatacttgcgttatttaaagatatatgttatgattacttatgtcggtttacaaataaacaattctaaaaaattatttaaggagttttaaatttatgaagaaaacaatttttgcaacattagcattaggtacagctattacttttggaggtattgctacaaatgaagctagtgcagacgaaattgattataataagttagcagaacaagctaaatcaaattcagcagaagtcaatacaaaaccaattcaagcaggtaattatgatttctcttttagtgatggtgaatttacttatcatttctataattataatggtaactttggttatgaataccattcaggctcaactcaagtagataatacagtatctagattagcaggagaagaacaaacacctgaacaaaaaatagaccaacaacaagcacaatttgatattcaaaataaacaagatactaaaaaagaagtacaaacaacatcagcaccagttcaaaaggaaactaaacaacctacacaatcaactagttctacaggagtctctgtagcagaacagattagacaagcaggtggagacgaggcaatgattgaaattgctatgcgtgaatctacaatgaaccctaatgctgttaatgcatcatcaggagctcaaggattattccaaggattaggtaaatcatggagtggtggttctatagcagaacaaactaaaggtgcaaaacaatatatgattgaccgttacggttcaacatcaggagctcttgcataccacaacgcacataatagttattaatatattaagactaagattaatttcttagtcttttttgtatattatagttgacttcataagttaactatgctataattagtttaacaaataaataaaggaggataatgaatgaataaatttaaaagatggtttcgaattaatgttttaaaaaaagaaacgctactttttaaagtttattggagatacgaatcaccgtctttaaaaaaacctcatgtatttcatatagagttatatgctaaaagcaaggcagaggcaagaaataaatcacaagagtatatactaaaaaatgcaaaagcatctgaggattttaaatttttaaaagtagaggagaaataattatggatgaaaaaaaggaaagtaaacctctaaaccttcaaaaaattagagtagaaaaaggacatacattgagaagtttagcttctgagataggtgttcattattctcttatatcttattgggaatatggaaaaaagaaaccaagaagtgctaatttaatgcggttagagaaagcgttaaatactccaggaaaagagttatttaaagaattggaggaagacgatggaaaataataatttagttaattttttaatgactacagatgatatagatgatactattgaaatggtagattcatttgaattacaagatataaacaaagttctaggtgaagatacgtttttaacaataatggaaattacagacagtcttcctgataaccaatataaaatagtattgttgtcttctttagacaagttattgaatacagatagaaaagaattagtagaatatgatgaagaattccctactatacgaaaacataatgtatctgagctaaaaagagatacagttaactctgtaattgatagttatatgaatactaatgtagaaatactttatacagaatatcctactattagtaactacagtgtagttgtagattctgttaaagtgttaaatactttatatttaattgaaagtaaaaatggtaaaatagaagcaacactgtcagaagatggagaagacttgcatgagtatatatcagaagagggttacagtgttacagacatattaaataaatttgatgatgttgaagatttatttgatgaggatgacagtttaattaatttcttttcagatattgatgaaggtaaaaataaaactattaaatcatttattgagttagttattaatttaaaataaaattagtggaggtatttgttttatgaaaaaaggagtatttacagtaatagctgatggttttaaatttaatgtgattgctaaagataaaaaagaggttcaggaacactgtttcaaatgctttgattttaattatatctcagtatctttttgtaaagaagtatactcagattgtgaattccctcaatttatggaggattataagtatgcaggatagtgtaaatatatacacagacggtagctcctcatataataaaggtaaagtaggttcaggtgctgtcttggtaagtaaagaaggaaatataatagcggaaattagtaaaagtgttgacaaaccaggattaataaagtataataatgttgcaggttaaatattggcttgttgttatggtattgaagaggctataaagctaggatacaatcaggcaatagtttatatagattatattggtttaatacattggtatgaaggtacttggtctgcaagaaatattctaagtaaaacatatatcaatatgatacgagaataccaaaaagtaatagatataaattttgtaaaagtaaaaagccattcaaatgataaatggaatgactacgccgataatcttgcaaaaaaatcaattaatatataaaaaggagaaaatattatgaaaaaaattaattcagtaattaaaggtgaaggtaagaaagtacaaacaacggatgttagaaaaattagttattatgttaaagattataacccttgcatgacagtagatgacgcaaacgactataatgcaactagtcaatatttggtaagtgataatggtaaatttattgcaaaatataataaagatatgaatgcagtaggattctatgaagaatcaggagatactgtaaaacatttaacacatactacaccggaaagattagaaggaactgtattcactattgaagaagaaacaaagattgatttaattaatgataccttacctcaaggtgatattttaattaaattttcagacggtagtatctatttacctgataatgaatcagtagtagatagtgtaaattacttggcagataacgattgggattctgtggatgacattatttatacaggattatctaaaggtaatagtgaaaattgtattgtagattttgatgctagtatctatcatgatgacttatttgatgatgaagacgaagaagtttgtgataactaccctgaatgtgaatgtagtaattattgctcttcaacaggagaatatatcggtaattagtactatattaaaagagagtaaaactatttatagataggggaactttaaaatatggcaatacaactaaaagagttagactttaagttaaaagattatcctaatgtaagatacaacatgggagaacatctagtctttaatgaattccttgaaaaagctacaaccgagcagttagatttctgtgaggatttctttaatgataatgttgaaatactttggaatgagagtcaagccggtacaggtaaaacaatgtgctcagtagcctgtgcttacgcagactatcttaataaagatagaaagctagtatttataatttcaccagtatcagaggatttaggaagcagaccaggtaatcagacagaaaaagaaatggcttatttcatgggattacacgatgcccttattgaacttaatatgaatcctgaacaacaaataactgaaatgttaatgatggaagataatgttaaagaagataaactaggagattgttgggtatctcaaatatcccatttattcctaagaggtggaaatctaagagatgctactataattataaatgaagcacagaactttaaacgtagtgaacttaaaaaagttcttacaagggttcatacaaaaaattctactgtaatagtagaaggtaattttaaacaaatagatttaaagaacgaaagtaaatcaggttttggagattatatggaatactttaaaaattatgaaggagcagtatttcataattttacagttaatttccgctctaagcttgcacaatatgcagacaattttaaatggtaaaataatatgttgacaaatccccttagttatggtatagttattctataataactaaggaggatttttttatgaattatttagctaaagtatttattaataataattggttggtgaaacttataacaattgtattattaactttatttctaagcggtctagtttatgttataagtgcaatatcattattcttatcaacagttttaaatttacctggtttagtagtattagcatttttagcaagtgtaagtcttattttgttttctatagtacataattcaaaggaggataattaatgaaatcgtatactaaagtaaaaaataaaggtattgtactagataaatttaaagaaagaggtctagttgtacaagaaaaattagatggcagtaacgcaagcttcacagtagaaaatggtgaattagtatgtttttcacgtagaaaaaaattaaatgagaatgaaactttaaatggtttttatgattgggtacatgaaaatataaatgtaagaaatacgtacgtatcagccttagaaaaatacattatttttggtgaatggttagttaaacataagattcagtacaaagaagaattttacaacaatttttatgtatttgatgtttatgacaaagaaaatgaagtttatttatcagtagaagatatgaatgtaattgcacatcatttagggttaaaaaccgttaaaactttgctagtagctaaaccatctcactacttaaatgatttaaaacctgaagaaattcaagaattagtaggaaaatctgacatgacagttaaacctgataagggtgaaggtatagtaattaaatacttagatggtaaatcagaatatgatgactactttaaattagtatctaatgagtttaaagaatttagtcgtcaaaaaatgaaaacagaagtaaaaaagaacgagtcagtggcagattatgccattacaagagcaagaatggaaaaaatgatttttagggctatagaagaagatagattatctgaagatgatttagaattagaaaacttcggtctaattatgaaacaagtaggtcaaaattttgttgatgatattatggaagaagaaaaagaaaatatactaaaaatagtagataaacaaattaagaaaaaaatgccacatattttaagagaaattttagaagaaaaaggagatactatagatggttaataaaattaaagacaaagtaatttatatgggtggacatatcctaaatgaagctatggtagattacagagataaacaacataaagaagtagatggcattgtaggagtaactccgtatagccctcacaaagataagtcaataaatgataaagttaatgcagaacaaacaggattagcagaacgtattttaactaatgattttaaagctatgcaagaatcagacatttttgtatttgatattcttaatgagggattaggaacaattgcagaacttggtattttactaggtatgaaacatcaagcagaagaaacaattaaccatatatatgataatggagaagagtattttaattattttacaaataagtttgaaacttcattaaacactgaggaagaattattagtaaataaacttgaaaacattgtaaataaacctgtattaatatactgctctgatattagacaaggacatggtaaaccatacaatgaccctgatagagctgaatttagtacaaaccaatttgtgtatggtatggttttagaattaacaaacggagaaggatttatttcatgggaagaagttattaatagattagagaaattaggggaacaagatggataatttatcacattacttgagtatattatatgctatattagttacagtaggttatataccaggtttaatagccctagttaagtcagatagtgttaaaggtgttagtagttatttttggtatttaattgtagctacagtaggtattagtttttacaatttacttctaactgatgctacgatgtttcaagtagtatcagttggtcttaatttaactctaggtattgtttgcttattagtagcttcatatagaaaaaaggactatttctctataccttttattattgtgttctcactgttactatttttattaagtgactttacagccttaacacaaactgtagcaactattactattatccttgcgtatgtaactcagataacaaccttttataaaactaaaagtgcagaaggaacaaatagatttctatttcttattattggattaggattagcttcattaattgtaagtatggttttaacacatacctatgttcatattatagctactgaatttgtaaactttgttcttatacttatatgttatctacaagctaattattactcaaggaggtaggtaatattgaatgaccttatcaaagagggaaataaatattatcacaaagtaagagcaggagagacattatggactataagtaagaactatgatgtggaaattaagaaattacaagaattaaacaatattaaatcagtttctttaactaatttagaatacgtacttgtttgtgtagagtagaccaggaggtttataaatgagcatagaaaagaaagaagaaattatagcacataatgaggtagtatttaggagtttaactcaaggtctatatgtaaaagaagtagatatctattcagatgttgtgagctatactaaagatgttgatgaagctcttgctatgccaaatactatcaattttaaaaattcaagaaagtatgaaaaacttattaggaatttagatttagaaccattaaataaaattcaaaaagttatatacgaaactcatttagaaggactttaaaaagttcttctttttttgttgacaaatattatttactatggtatgattagtacataacaaataaggagtgattttaaatggcaataacttataaacaaaaaggattaacagaacaagaaattattaatttacctaaggttaataaagggtgtatctatataggagaagaagatgtatttcttaagaaaaagaaaaataatataattaacttaggttctaaagaattatttagagatattcataatatatttagttttgatacagccacagaaatacatttatttttagccctatgtggtaataaagaagtaacaaactttgaaggtaacccttatgaaacagttgaaaaattagttgaaggtgtagttgatgataataaaggaagaagttacaaagagtatattgaatctaatagagaagaaagaaaagattttcctgtatatggtgataagagtagaagacgtataaaatcgaaaggttatattgaagaaaaaattaaagaactagaaggtaatgaccatttatgggggcatgaatctagacaattagaagaatataaaaaagtagtagatagtttaaataatgatattatggatgtactagaccaaggtaaatatggtcttataaattcatctattattgttatgaatgaagatatagaaaaaggttctagtgagtactatagtgctatgacagatgaattatatagccgtgtttggtacatgcatccaagtactgaaaactattcatctttcggtcttaaagttaaacatattagagataaacataatatgggtaataaatggactttagaaaataaaagctcatttgacgttaaaacaggagaagttaaagttttcttaacagatagtcttgttaataaagaaataactttaaacctatataaagatgatattagtaaaagtgaatataagaatgaattaactttagctgttttattaaatgttattttaaaaaattacttaacacctaatttaagtaaacatgttattagtaaaataattgagcaaacactaagaaatgatggttttggattttctaattggtgtcctgatgatgttgatatatatagtcgtgtaaattatggtggagacaagtatagaccgttccgaggagaaaaagcaactgataactatttaactaccctaacagaggttgtcaaaaatattgataagataaataatttagaagagtataatttatttgaaagaaatagtttattatttaatataccaaataaccctaagtggaaaatccatgaagcatttcatcttacaaagcaaacatataaaaagctattaacattaaataattttgaacaaatgaattatttgagattctcagatacattgtataattactataatcatttgcataatgaggtcaatttacatcaactatttgatgatacatttttaatggttcaggatgtaagaaatgttacagatgctttaaaagtaaaacctattgtaaatgaaatattatctatatcttttgctaattacaaaaagatgacgcattatttagatgtagatgctcaagatagacaacgtataacagggtatgcgctagatagatattatcttgactatttacaagatttatcaatattaataagagaaggttatagaacattagagagtgttaacttaacaccattttcactaaaactagaacatgatatagttacagatgagaaacaatctatacaacaacaattagatgatgcagaacttaaatctaaatatgataataaattagaaaaaataattgataaaacttataaattaaaagatggtagaaaagtaaaattcctccctgcagatactgtaagtaaacttaagaatgaaggtaaaatgttatctcattgtgttggtgggtatgctaacagaattttaaaaaatagttgtttaatattattagcaagattagaagaagatttagataattcatggtttacagtggaaatacgtattacagataatggttatgtattaggtcaacaacaatcaattgatgcctataaattacctaatgaattaaaagaagcattagaaaaagatattaagaaaataaataaagaagaatttaaggaggttgcctaatggtaaaaccagttataactttagaacctgaggatgtaaaagtattattagattatcttagtttcttggaagatgatatgagaaactacgaaggtatgagagaattatatgaagaattacacaaaaagtatcaacttgctaaaggaaactactcagattaattgacaatagtataataatatgatacaataaaggaagttagaaatggaaaaattccaagaagattatgttaatatagatatcagagttaaagcttatgttcgtgtaggttataggtatgaagaagatattactaataatttacatgaattagttgaagataatttaaatgtaacaagtgactctgatagcctaattatcaaagatacagaaattaaaggagatatagaataatggaaaaagtagaacttattaaacaatgggcaaaagatagaaacttacaaacaggtaaacccgagggtcaaatgctaaaattattagaagaagcaggagaattagcttcaggtattgctaaaagtaatgaccatgtaacaagagatagtgttggggatatttttgtagtattaacagtactatgcttacagttagatatagatattgaagagtgtattgatatggcttatgatgagataaaagaaagacgtggacgacttgtaaatggtatatttgttaaggaagaagatttaaatgaaacagaccgttattaatatggaaggtatggaatttaataatttaaaagttattagaagaaatggttcagataataaaggaaaagccttatgggacgttaaatgtcattgtggtaatgtattcactaccttaggtgcttctataagaaatggaagaacaaaatcatgtggttgctctagattaaaatccactaaaaaaatgggtatagataataaaactcatggagaaactggtagtaaactatatgtaatatggaaaaatatgaaagctaggtgctataatagtaatcataaaagttatagtaactatggtggtagaggcataaaaatatgtgactcttggaaaaattcttttgaagactttagagattggtcacttaataatggataccaaaaagaattatctatagaaagaaaagatgtaaatggtggttacacacctgataattgtaagtgggctactatggaagaacagagcaaaaataaaagaaataatgtttacttatggtacgaaggtaaagcaatgacacaatcagaaatatgcaaattaacaggtttatctagatataaagtacgtaaaaattttaaacttgttaaggaagaagaccttaaaaaataagtaataactagcaaggaaaactgttatattatgaggtgtacttagatagtacacttccataatatctttcctttttcaccttgcttgtagccaagcagggtgtttttttatataatttaggagggtattacatgaacgcaaaagaatttatgaaaacacaagctcaagtagaagattatttagataaattaaaagtaacaattatagaagatgcactatcagtatctaaggaatggtctaatgattcaaatgatttaggttacgctttgtctagtcttggtgagagtataggtcttttagaaaattattataatatacaagtagatgcacatttacctgagcactataaaggtagcaaggatgttatttcttttctagaagaacatttttcttatgatggctttgttgattctatgatatttaatattgtaaaatatactacaaggttaggaagaaaggatgcagtagataaagaagtacaaaaaattaaaacatattatgtacgattagaaagaaatataaagtacggagatagtactcgtgtctaaaagaacagacaattttatatatttctgtaaatattacttttcagaatatttaccttcactaggtgtagaagtacttaatcataatgaaacttctcatggaacaatggaaggtgttaagaaatattatatagcaaacatactttatgaaggtcaagaacttacggtaactattgatttagaggaattcaataatgcaacttctatgcataacatgttagaaataatgaataatcatacatataattgtatgtttatgtatgatatggatacacatgaaactaaagatattgatgatttttttaaattaatgtatttttaacaaaagtgttgacaattaccttaccctatgttaagttataggtgtaaggtatttttttattagcaactaaaaaaagttttagaaagttgttgacaaattcaaatacttgtaatataataaatgtataacaaatcaaaggagaatgataaatatggcaaagcaagatactattgaaagattagagagattggtagagcaacaaatggaaacaacagcagatttagcaaaaaaactaggagagaaaaactctaatccgtacgaacaagcaattgtagatgcaattgttgagaaagcaggaactgagagtagagaaattattattactgacgttaaaaaacaaattgaagaatatgtagaagaacaacttagtaatttaccagttaaaattgaattacaacaagaaggaaaaacaattaaagatatctcaggaatctttcattatagataccaagatatactaaagctagttaaccaaaatattccagtatttttaaaaggtggagcaggttcaggtaagaaccatgtattggaacaagtagcagaagccctagatttagatttctattttagtaatgcaattacgcaagaatttaaattaacaggatttattgatgcaaatggtaagtttcatgaaactcaattctataaagcatttacaaaaggtgggttattcttcttagatgaaatggatgcatctattcctgaagtactattaattcttaattcagctattgcaaataaatactttgacttccctattggacgtgtaacagctcatgaagatttcagagttgtgtcagcaggtaatactatgggaacaggagcagaccatatttatgtaggtagacaacaattagacggagctacattagaccgctttgctcaagttgaatttgactatgatactaaggtggaacatcaactatcaagcaatgaagacctagtaaactttgtacaacaattaagacatgagaatgatgaaaaaggattaccttatgtattctcaatgcgtgcaattattaatggtagtaaattagatggagtaatggaagatgagtttgttgtagaaagtattatctttaaatctgtaccgaaagatgagattaatcaatttattagctctttacctgaaggtaacagatacacagaagcaacaagaaagcttttaggtatgcaacaagagcctaagcaggaacctagaaaatctgatagtacatcaaaagattcaatggattttgatacaattatggataaattaggattagaataggaggcaaatcaatgggtagacgattaatagataactcagaattaaatgtaattaaatatgatggtctacctgatttcttttctgctttaaaaaagaatagagtttcaggtagagataattcatccgatacaggtagctatgattttacagggactcatagttttcaagaagcctataacttaatggttaagggtgatagagagtcatatgatatggtagttaaacttaaaaaaatgacagatgcattatttagaatggataagtcagtaaaaagaaaacctgtcgtagctccggaaggatatcaacctcacgtacctaatgctataaaaggattacctaattctatgatgtctcagcaaagagttaaagcagagaagaaagttattgatgtattttataattctagtattagttggatggaagaccctgaaaatcttgcttatagaggtgctataatgttaagtgctattcaaacattagaaacaaaaggatatagtataaacctttacttaggtaaattatcaaattcagggtatgaagataagttaacagggtttgttgttaatataaaacattcttatcaaagattaaatgtttttaaatcttccttttacttagtaaatccttcattcttacgtagaatatcttttagagtactagaagttgaacctgatatggttgacctaactaatcatggttatggtagtgtggtaagtaaaagtagttatggtaataaattaacagagcatatacttgataatgctgtaatttttgattctagcgtagggattgatataaataacgattcatctgaaaatttaagagctgtaaaaaaactattcggaggtaggttgtaatggctaataatatttgggctgttgtattaagcattattattttactcatcattttattaatactttggtttctttttagaaaaaaggtaaatggtggtaatagtaaaaatgtagaaattcaaaaagcagaagaaaataacgataataaagaacaagaggtagaagaagctcagtatagagaacttaatgaagaagagaaagaaaaaaatgaaaactctagtaaagattataagtacgataaagagaaagtaaaaaataaacttaaggagttagagtaactatgaaaaacccgattaaacttttatcaatagctgtagtaactatcttgactttttcactaacttatgttatacttaaaaaagaaacaaataataaaagaaatggtgtagcgccttttgatttttcattagaagaccacattcacctaaataaggagattaaataaatatggtatacgatagtattatttctagaacaatggcagtatcaattttaaataaatggattgcagaattaattacagatgttgatttagataaatgtaaatttacagaagaagaatatgggaaagtagttacaaattcaatcaataaaatacaagatgtattaattgaaaagaactatgaggttacagatggtgaattgtacgatatcgtttgtacagagttaattaacccaattaaaaataatacagaagaagaaaaacataatgaaaagaatgatttattagaacatttagaagatttggcttttagacatgatattgatttagggtatgttagtgatgggtcatataacttaactgtaactcattggttaatgcaagatgagtttacagatgttaacatcaaagttaataatgatgaagacttctatacagttacaattccggaaagtaaatatttttggttacctattacaaaagagaacttagaaatgttcttaacacaagaccctattaataaaggagaggttaagtaatggatagaattatcggtaaacataacttaactcaagatttgagattaggtgacaaagtagaagtttatgatgctcataaatttaaagaaaatgaagatgggactattgaattaggagataaaataactgaaggaattgttgtagattataaaggtgactttacaggtaatacaagtggtttagttacccttgactcttctgaaaaagaattaatcattggtgaatataattttaaacttattgaagaaggtaatttacaagcagtttatgattctgtatctaaaaacaaagtagaaagtctttctgaagattatgacatgtatagaaagttacttggagttaaatcaggagaactagcaggtatagaagatgaactagagtacttagtcagacaatataatagtaaagtagataattataatggactactaacattatctaaagaaaaagctagagaattatcattattaacaggaaataaaaaaacgattcctcatatgaaaaatagaagattagaattaggtaaagaagcagacttttaataagtctgcttttctcttatattaataatagatataaggaggttggtatatggcaaatgaaaaagagattataagaatggttaattatcttattgataatatgtctatgtggcatataaactatgctagggctgtgttaataccaagtgaggtagaaaagataattaaagagcatgagaagtttgatgacctccttaagaagagaggagaatggttagtaaaaggttcagatacagataacattgatgatttagaaacttataatcaaataatgaataatcaaaaggatgaaatgatgatacaagaaattgatatctatacccaaggaaaaacaataacaatagataatgaacactattcctcagatgatttaaatgaagtcttaaataagctagaacaatcagaagatattaagataaaatctaattataagtcattatatgtaggatatactaacgtagtgggttatgaggttacttacgctagttcctacgaggaaacttttaaaaatgacttagaaaaagacctatgatatattagtactgtaagaataattaggaggagtaaaccctatggaaaaagtaaatcatgagtttctagcagaattggcaaagagtaatagtcctgtactaaattcaaaaccacttcaagatggagactataatattgaatttgactatgatggttttcactttgagttctcacagaaaaatggttattggcaatggaaatacaatgctaaataattagtatttaggctactttaattagtagcctttttttgttgacaaaatagaaaaaatagtgtatagtaaagatataaataaaaaggagatgactgattatgtttaaaaaagcacctcaatacattatggaaaaagtagaaaaagaaaacaatattctaggagaagatttaagtcttgatatttattataaaggagttaaactaactgttaagagacaccctgaaactggtcatctaaatggatatataactttaccttcagatatcaatgaaaaagaatatgactccttagaaagacgtgctcatagaggtatcacttacgatgattatgactatgagggtaagagagtattagggtttgactgtgcacatgcctgggatatgacaccatatgctattatagggtcattagatgaccaatatagagatttagagtatgtactaagtattttaaaagatatggcagaatacgttaaaaaggatgagtaatatggacttttaccaatttctaaatcacgaaaatgtaagagttaattctataacaccaagtcaaaagaattttattagagaaaatttagaattaactaacctagaggatactgatattgattttattagttctaagaaagcaaaggaagaaatagagaaaattataagaattaaaaatgaagaagaatatgatatggctatggatgctttagcaggatgggtaactaaacatggttattaaggaggattactatgaaatatattttaggattaataacactagggattatactatttaaagtctatgaacactttaagtataaacaagatgaagttgatacagaagaagatatataagtattgacattattatcaatatatgttattatttaaataacaaataaaaggaggatgttataatgaacctagaaaaaagtttcttattatcaacaatagaatttggaagtacttatcaaggaacatcagatgagcattcagataaagattacatgagtttagttgttcaacctttatcagatactatatttaggaataatgaaaaagcaagtaagcatacagaagtatcaagatactatgcagtagaaagatttatctctttagtgctaaaaagcgggtttgataatgttcttaatttatgtgctcaattagagcaagctaaaaatactagatttaataaaactgttttagatttattttatgatgattttatatttttaacttatgttagagctaattttaagcctatagcatattcggttatcggtaatattaataacatactaaaaaaaggagaattaactggtaaagaccttgttaagttttatacattctataatcatttagaatactataatgatttattagatgatttagataacttaaatgttagctataaagactttgcaaaagttaaatatatgccaaaagaagtattagacaataagagaagcaatgtaagtattgaaaagaaaaaagatttggttaataaagtagagcctctaattcaagaagtaaaagataaacttaagtataatgaatctaatatcaaacactataaagatgctatggaattagtagaaaaatctttgaaagacaaaactgtagcattccttacggaggtctataatgagagataaaagaatacactcagaattattatatgatatcataggtaagcacatacaagaagaggaaaatattacaccatatatagaagctatatatgtagatatgatgaatattattgtagtagaatatactttttataatgaaaatggaacaagaatgctaggacaatatccgataggagaggttatgtaaatgaaaaatattattaattttttagtagactataacataaattttagttactcagaagatagtttaaatgttatgaataactcatacttagtagataaacatggtacacaagattatgaaattgtaggtaactatgaacatattacaggggtattttcttatcaaacagaagaagaggttatagctaagcttaaaaatcttattggtatttgggagtaatatatggaaaaaatttatatattagaagaagaaatagaggaaatggactatgacttgtgggaagaagatacagtgtatacaacaagttatgaagttttaggttatactgattctttagaggacgcagaatatattagagataactatggaacaagtaatcctatatttataaatgagtatccttatctaacaaaagagaagttaatagaagaacagcgttattttagatataatagttatcttgaacttaaaagagttaatgggtactttgaaatatctgaaataaatgaattacatgttactgaagactttagtattaataaagatgataaaaattttgattcacctttttctataaatatgttttcacataatagaaatagtataggtatagaattcattatgttttcagaatacaatgataaagaatatattatagaaaaagaaaaaaattcttttttaatgaaattaaaatatctccttaaacatagtaaagaagcggatatacgtagcacatcaaaaattatagattcaattgataaattaacttgacattaaatataatttatggtatattattagtatagtagttaactaaagcctcttatataatgctaaacacagttagcctttttaacctgataatgagagtaagagcctaactatatgggtactttgaaatcattatattttacctatctaccaagcgtagaaaaggtctacggtaacgttataattctatttagcgttactagcaatcctgagtaatggcattggctagatgtagctacctagtcgttgaggttcgagtcctctctcaggatatttctaggactcttagcttaaaggtaaagccaaccgctcataacggtttgactgtaggttcgaatcctgcagagtccatataccaggctagcaaaaaacttataggtattagacatatgtgcaatcacttgactatgatttaatattgtatgtggatttattgtttcatatctactaagtaaaacctatttctcttaagttactggttataagagaaggagtgaaaagctctaaaggtttagtcaacctgatgtacgagagataccgtatgttgcccggcagaggctttgtatctgaccgtagactccggatggtagtgtccctccattccgtatctaacaccaaacgcttggtgtataaatatatagtacacatgtacttttgagagtgtataaactaagtacaataaaaaaacaatcttcttcccacaagctacctatcaaaatatcttgtgaggtataacgcagtgacgagcgtttcaacgacagagggtctcatataattgtcgtaaaatattattaaccgtaatctaagtacgggagctctgtcggacacctatttaacttcaataggtgtttttttgatatattatagttgtacaaaattcaataaaaggagaagtaaatatgactaagaaattgaagctttatgactatgaaaataatcttttaaaatcaagtgaaaacatagaagattcaataggtcaaatagttatagagaatttaaatcctgatacaacatatgaagcaggtcactttaaaatttgttgggatattaatggtgaagaatcaataaaagtagatataccaaaatttgttaccttaacatcatcccaggacaaacttattattgttacttataatgaagtagaacctatgaatataaaagcagaaaatattataggtttacaagatgttatagatactcaatttaacgaccatataaaagaagaatttatgacagaaataaataagattatagctgataataaaccaacacaacaaccaagtacaacaactagctcacctttgaaagataagaaagttatattcataggagatagtattacggaagtaaatgcaagaacaacaaaaaactaccaccaatttattgctgacagaacaggattaataaatgttaataaaggtataagcggaacaggctatcaagaccgtaaaaacgtagcctacactattacagataaacctgatttaatttgcgttatgttaggtacaaatgactacggtttagttggaggtaaaacaaaacccctaggaacagctaaagaacactcttacactacagtagcaggttcaatctattatacttattatcaactatctaaggtttttcctacagtacctattgttgttctaacaccaacacctaggattgaaagtaatccttttaaagaagttgaaaacggacaaggatatactttaggacaattggtagatgttataaaagaaatagcaaaacaattttcattccctgtattagacctatatagagaaagtaatattagagtgtgggataacaatgtaaataaaacattctttgcttggaaagaaggcatggaggatggcttacatcctaatgctaaaggtcatgaatttatatcatacactatacaatcattcctagaaagtaaaggtactgtaggtgctatagcaagcccaccatctattgacacttctgttaaggatttaggtaatggtgtttattctaaattaatcagaccaactggaatgagatggaagaaagatacaagctttgttatgaacatgagtacagatgatatagacttaactgctaataagatattaaatgtttcttataatggtaagagcttgataaaccctgaaggctacacatctaattcaccttactggtatactttacctgcttatgaagatggtaacaaatataatagaatttccgaagttcaaaacttcttaaatgcttttataactatagatgataatgctcaagggttagagtttatgagagattacattaaagttatctatgtagataaaacaaaaactaatattgtaggggaatatactcaagtaggttacaaagatactacagccagtacaccaccaacaggagatacatcaggaactatagcacctgtaagtaatggtgatggtacgtatacagcaacattcacaccaacagctatatactggaaagaagaccaaagtttcatgattaatgtagataaaaataagttagatttaactggtaagtctgttactaagttagaatataatggcaaaacactagttaataatacaagcttagcatctaactccccttactggttaacagtacctactgcaacggaaggtacaactaataacagaacaccagaggttaaagattttgtatctgttcttacactagagtcaacaggaacagatggtcgtaaaaagtataaaaatgttgaaattaaattaacatataaataattttaattacctacctactaaggtaggttttttttattgactttttttactaagtatggtaagatagttatatacaataaggaggagattagatggctatatacgttgttcccgatattcacggagaataccaaaaattattaacaattatggataaaataaataatgaaagaaaacctgaagaaacaatagtattcttaggagattacgtagatagaggtagaaggtcaaaagacgttgttaactatatatttgatttaatgtctaatgatgataatgtagtaactctgttagggaaccatgatgatgagttttataatattatggaaaacgtagaccgattaagtatctatgatattgaacggctttcaaggtattgtatagaaacacttaactcttacggtgtaagtacggtaacgttaaagtatagtagtgtagaggaaaacctaagaagtaattatgattttattaaaagtgaactaaagaaacttaaagaatcagacgactatagaaaatttaaaatacttatggttaattgtagaaagtactataaagaagacaagtatatattctctcattcaggtgggattagttggaagcctgtagaagaacaaacaattgaccaattaatatggtcaagagactttcaatctagaaaagatggttttacctatgtatgcggtcacaccccaacagacagtggagaagtagaaattaatggagacatgttaatgtgtgatgtcggcgcagtatttagagacattgattttccatttattaaattggaggttaaaaaatgaagaaaaaatattttaaaggtcttaaattaaatgactttgaaaaagaagtttttggactaaaaaataataaaaaatataagaaaatgaagaaaaaactaggtagaaatgagcctaagtattggaattatgacatgtccttctttattcagttatacgctgacttaaacgcatttgtagagagtagtaaccatgtggatatggaataccatacttttgtagatgtagacggcaaagaaagaacacaaatagatatgataaaacatattttaagcttgataaaatattatcataaagaaatggatgattttgatatggataaatatgatgagcttgaacaggtacaaattaaaatattagataattttaaaattgtattaccatcactatggaattaaaggagagatattaaatatggaaacaataagtttaggaagattactcgaactattcaaagatacaaaaatcttaaataaactcaatagagataattttatagctatagaacctgtatatcgtcatgatacagataataaaggtcataccatacactttaattttgaaacgcctaattgtgaaaattttttcacagatgagtatattgaatacaaaagaagaatctgataaaaaaaaccaagtcgagatagagaagcaaaaacaacttgataaaatggctaatactttagataaatatttataaggagagatattatgagagaaacaagtagatacattatgttttggggtaaggaagatatttattctaacttttacccaataacatttaaacataaaggaagaacatttaataactcagagcaagcctttatgtggcgtaaagcaagatactttaatgactttcaaatagcaggtgaaatactaaatgctaagaacccaaaccatgctaaaagtttaggtcgtaaagttcgtaattttaatgaagaacaatggaataaagtaagatatgatattatggtagaagtagttaaagataaatttatgactacacacctaaagcaaagaatattagacacagatgtacgtaaagatttcgtagaagcttcaccttatgataaaatatggggagtaggtcttaaagcaaatgaccctaaaatattagaacaaagtaactggaaaggtcaaaatctattaggcaaagtaatggaagatgttcgagtacattgtatctacaataagtaggtaattataaaatggataagataaatctcaataaaaaacatgagggttctactgtagttaacatatcaaataatattacgttaaaaatacaatgtacagacctaagaaaagaatgtgatgattcagaagcacctactacctatacccattttaaagcttatatcgtatataatatattcattgtagttaatgatagaaaacaaaagaaaaaagttaagtatgattactataatgaccatgtaggcagaggtaatgttaaagacctattgaaagtaaaagatgttatcttccagttatccactcaattaaatactaatgaaattattaaaatatcaggtgcagatgaaagaagatataaaatctataaatattttatagaaaaagatataagatttgaagacaatatgtattatagtaaaagtaatatatggattataaataattttagcttattacaaaagtttcaatggaacactgtaataactagagatggagactataataaaaaagaacttaaaaaggttgataaagaatggaaagaattattaatataaaaggagagttaaaatgaatatcaaatatattgatttagtattagagaattgcgatgttgtaagattagaacctaaagacgtaagcaggttccatatatcaggtattacagaaggtgtagattactatggtacatataaagggactgcaaatataagtcgaacacgtcactgtacttatttcggtattcttattgataaacctatggaaatacctcaagttggttttgcttatcctgataatacgaacgcttatgaaatgattacagcatattcagatattacagctatagatattatttatgaaaatgacgcaaatgaatatatttatgtagactttaatgaatacaatgataactataatctcaatcaaaagaatgattattacaataatatgttagaaattacaattacagagagtaataccagggaggaagaagatgaataaaacattttttaagttcctaggtaaaaacacattagagtattcaaaacaggggctaggttttcttgtagcccttcctataatgttaattatactttctgtattcctagcattcattataggtattcctgcagttattatttacgctctacatgcattaaatgtagacaatgattttattatacagttagtacctgttatgtggttcataatactttatggtattgtaagaacagatgagcacaaaaaaccatttgttaaactaagattaaaggattacttattatctatattatatataactgctattacagctattagtgttttagaaagctatttgctctttcaattattaccttttacaggagatgtaagagcagttataacactattatcatttataatatttgttgctgtaaatagaggtatttgtaaaatagccatcaagagctataaagaatataaggaggactcacaatgatagaaattagtatctcatggacttatctaatatcattcttgctactatggtcagccggcaccttatacattaattaccttgtttatagaatacggttaacaaataaggaacgtaaagaaatgagtaaggagcaccaccgcaatagagaagatataaaacaaaggatagaaaatagaagggataaataataatggaaaattataaaaactttattatagaggaaatgaataaagcccatatcttagtagctaaagcagaacaaattaaaagggatagagaattagcagaaaaagaactaaaagaagtatatagaaaagcagaagcctttgatgaaattgtaaatgagttattatatcaattacaaaatctagagagttgggatactttagaccaaaaagactgtcagacattaaaacaaatactagaggaaaatataaaggaggaaaaacagttgaagagatacaaagtaaaacgtactattactacagaagaggtaagatatatagatgcagaaacagaggaagatgcatggtatagtgtagaatatgaagatgaaggtgcagatacagcacactataatgcagaatatggtacatggtcttacgaagaggaggaaaatgactaatgaaactataccaagtagaacatgataattgtgaaccttatgaagataacttccattttagagaagataagatatatacagataaggagaacttaattaaacgtattaaagaagaaggttataaagaggaaacaaaccatagaggagagcaagagttcattaaaggagacccaagagatttctatggaatggatatgattactatacatgaattagaggttgttaataatacctaagaggagggatttaatttccctctttcttattttagatatgttgactttatatttagaggttatctatttgtactgtaaattgttgacttacagggaggggttataatgttgacttttaatatagggtgttgacttactttctatattttaggtgttgacttttaaatatttattttcataattttccccaaaaaataagtacctgggtagagggtaggggtatatagacccacccccattgagtggcattttacccctgcccccgtataatataaaaaaattatataataagataaaaataatagagggattttattccctctatttgttatttaaaatattccgttttgtttttttatttctacgattcttttttcttgtctttctaatttgttaactaaaatatcgtaagcttcagtgtattgttctcctctagcaatcattctgtctaatacccaaataatatcttttacatctttttctaattgttcctgttctaataagtttgtcatgttcatcatttccttttcttttaatttgttaagttcattatatcatacaaattaaaagattgtaaagcgttttgataaaataatttaaacaaatgtttgtattagttctttaatctcctcagtagataatgaagataggtcataagcttctctaagctcttctaagctaccatatgagccattactatatgaagcggtgttattgttcatctgtattgttccgcttctctgtgtgcgtctgtgaagctcctctgtgatgtagtcatctattattacattattaatattattatgttcctgcaggagtttgttctttgcactcttaacgacattatgaacctctctaatgctcattactcatcatcaccattcataacatcaactaataccattagctcttgcttagcctttatttgcttctctagttgtttatttaactcctgcatagtcttttgagtatctgctatttgctcatctaataatctaactgcttcgtttaacgctttgtttacccttcttgtgttcatgttttacatctcctctaaaatataatctaaatcatttccgtataaatgtctatattctgattcttccatatccataaccgtactagcccattgtttagcatgagccattgcataaaccttcttgccttcgtctgatagttccaaaaatagtttagcttctagagagtcattatctattgtccaatcttcctcgatagtactatcaaactcgatagcaaataatatttcgtatagtttcttagcattgtttaattgttttgttttcatcttcaacatctcctaatagttttatattagaagcggtttaaaccgcttctgtgtgtctctgtgtgcttcctaggactattataagttttctttgatttcatcttcgtattttagtaaatcgttttggtactcttcttctgtcattgtttcaatgtttccgtatccatctaacccgatatagctatgctcagggttgtaagtaccaaaatgaatcatgtttgcaagttctgaatgttcaagttctctaatttctaagcttccccaaaatgtgtcaaaatcagttttaataatgttttcaaatgctccgttagtattttcatttgcttctgaaatcatttcttgtaatttgtttaattttgtcataataatcaaatccttttctttttttattttttctatactcttatattaccatctatatgctaggttgtcaacacttttttaaattaatttccaaccgatgtcgtttacatattcttctagttcttccatagtgtccgcaaatttgatttgttgtaaagtgcttgatgtaactacaaccgcttcctggtcgtaaattttactgtctagaatgttattatctaagtggtcgatgtactcccaaattaggtcttgttttacgctctcaagtgttgctatgctaattacgatttcattatctctattgattaatttcatttgtatcaattccttttctttagtatagtttaatattatcatttattatttaggttgtcaatacctttttttaattttcttcttctgagttccaaccgttaatgaatccaagtacgaatggtattaccatgaaaaccaatatccaaatcatcatttttttttacctcccttatttgttttaccttatgtattaatattaacatgtaaggggttaagtgtcaaccccttatttatatttttttttaaacagtttctgagttcttttttaattcgatttgtaggtctaattctctaatctgtgcgcaagttctttcaaatgcttcatagtatccgtttgctaattcctcatctgattttctttctagtctctctaattggctttctaattgtttgattgtttttgtcattgtaatcatttccttttctttagtatagtttaatattatcatgaagcggttagtttgtcaaccgcttattttaatttttttccatgcttacattttcttgaccgtacaggtcgcaccattcactatattttgcttctgcttcctgcttgttgaatgttgcatacataaacaattcttgattaactagcgttacaatttcgtatctcataattatcaattcctctcatttggtatatattaatattaacatggtaggggttgaatgtcaaccccttttattaagtttttttatgcgtattcttcgattgcttcatgtactaggaaagttaaaaccttaccacctaagaatttacattcttgatttgcttctgatagagtgtagtcatacaccttttcaaagctaaccgcttcgttgtattcctcttgtgtcataacgccgtccataacactgttatccatcataaggatatattccattgccgtatcttttactatttctaatctgttcataattatcaattccttttcgttttttttgtttttctaactatcttaatattatcatgtattcggaagtttgtcaacacctttttaaaagtttttttaaattctttttttaggttatttcctccgcttccttactacactttatatattacactataatacaaaataagtcaaccctttttgtaaacttttttaaataaattatttgaaagaaagttcttgactttaggggcaaaatttgagataatggaggtggacggtatctttaagataattaaattattatataaaaaaagaaagtattgacaactagtagcaaaattgatataatggacttggagccctaaaaactctataacttttttatataatattatttttatactaaaaaagtcgtcactctattatctcattttttaatacatttgtcaagcataaattttacataaaaaacccgcttcaagaatttaatccgaagcggtttatataaattttttatttcatgatatttaataatgttgtgtgtaattcttcaatgtctgattggtctacaatgtacaatgtgccattaactttaatactgattgcctcttgtccgtaaacctcaattaaacgtcttacaatgccttttaattcaactgtcatgaattttgcacggtctggaatgtagtaccattcaagatttaagttgttatcttccatgatacgcttttcatcttctgaataccattgtcccttaatttctgtaatagtgcaaccgcccgcttccattgtaatactgtttacatattctttaatacgtttgtctgcaatctcaacaccgttgttatcctctttaggtacgataatttccactttattttgtaatttgaacattttcatcaattccttttcagtttattttgtcgttgtgcttgattaccttacaatttaataataacatggtagggcttggaagtcaagccctttatttaattaattttcgtaaatgaataaatctttgcttggtaagtatctaaagtttggcgcaattcctaagcaatatacaagtgtgtttaaactgtcacggtctgagttgctttcaccatagtatgaaacaatttcatttacgcttaagtcaatctcaattgtttgtgtgccccaatgtctcataattaatttattgccattaatttcgattgcatatttttcctcaagctcacctttgctatatccgtcaaagtaacgaccgtttaaaattgcttgccctttgttttctgctttagttaataagttttcgatagttttgataaatttcattataatcaattccttttctgtttgttttttgttatcttaataatatcatggtttcaagtgactgtcaatagttttttttaaactttttttatttaggttggaagcggtcaaccgcttcccttaccttgtatcttaatattaacatgttgtttctaggttgtcaatagttatcttaaaaaaatatttatgttatcttgtagtagtaaaaaccagtttacaagtttaggtgtgattgttgcaactaaaccacctataataagtaatagaatgttatccgttttttgagttgatttgattgttttgtttttccatttaaattttatcattttgtgttaccctcctaattggtatatatcaatattaccatgttgtttatgtaatgtcaacccttattttaaaataaataatctaggtttttctctttctttctatcatagaaacgtctaatctcacaagctagccataaaataatcatttaaatcaatccctttcctaattggtatacctttatattacagtataataaaagataagtcaataggtttattgaaattaatttaaaataataaaaagcccacataatagcgggctttgtgtttaactccagtttatagcttgtctttctttttgtagttcaagcaatctcatttgtaaagagcttgcttgtgctttactgttttcattatgttttatcatttctttaacctcagtgatttctctttttactattctaatatttctcattttaacaaccgccttttttttatttgttttcctaattgctatacctatatattaaaccataataagagataagtcaatagatttattgaaattaatttaaaaaacttttttgaataaaagtattgacaataagtccgaattattatataatggaagtgataccaaaaaaggagaggaaaaaaatggttgaaaataaaattaatgaagtttggaaacctataaaaaaagaatactttaataaatataatttttatgtttctaatttaggtagggtaatgataaatgatagattgagtaaaatacatgaagacagagacggatatctaaccgtaagggtaaataataaaaagcaaatggtgcataggcttgtatatgaatattttggaacagacttcaataaaggttatcatgtacaccatatagacggaaacaaacaaaataactgtattgataacctagaatgtgtaagccaatcagaacataataaaaagcatcacaaggataacacgttcaataggtacaataggggttatgtattaacagaagatgaaagaaaagccatagcaagcaaatacaagccttataagtacactataccaatgttagcaaaggaatataatataagtgaaagcactgttgaaagaactataaaaaaatataaaaaagattaaggaaaagggttgaccttttcttttttctatagtatactatatatatagtaagaaagcggtaaggagcctacgtgtccgctatataagagaagaggttccgaggaaggcaccctttaaaatcatttaatataaattttttatataataatttaagaatacaaaaacttttttatatataaaaaagtcgtctcactttaattatacgctatttttcaatgtttgtcaagcattatttttaaaaatatttttaatttatgtattgacttgtgggggcaattttgatataattgaagtgatggctatcttttatataatttttttatacaataatttttttatactaaaaaaggtcttcacttcattataccataaaaaatacagccttgtcaatagtcaattttacactaatttatttattaaataatttttttatataaataaaaataaataaaaatccctagaaatataatcctagggaattgtataatttttttatttaatctatttagtttttaattctacattacaatataatttatattcattatataattctgattttaaatatttagggaaattacctattgtactagttaaattataccaacatttaaattcttctgaataacctcttaaagttattaaaccatttgataatttaaattgttctctatttaatcctaaatgttctgctatactatttttaatattttttgtatcgtctttaattgctttcaatgttttaactggtttagtttctatttctaatatcatattatcatatcctttttatataatttttttatttaaatctgaagcggttttaattcttaaccgcttctatttctttaactttatctagtgcaaaatttaatgtatcttctatattatagctttggaatactacaccaccgccaaaccatttagcacgatatttattaaatccgaatagtttgttgatgttgtcatagtcccataagccgatacctaagtccctaaagttcactacataacgtgggttgccgtttgtgtcgtttggaattctgaaagccgtaatgtcttgcccttgtactgtgtgagtttcttcgtataagtaatttttgtttgtcataataatcaaatcctattctataatttttttatttaatttcgttatttgctagttggcttgtcttatttgttatcttaataataacatgtatcttgtaaggtgtcaacacttttctttaacttttttaaaaagttttttgaggtgtgttgctatcccttacacctattatattactatagatgcttgaggattgcaacccctatttttaaatttcttcaacaaattttatttctttgtttttaactccatacactacattttcatatatgattataatcacatcatcaattacatttactaacatgctagccggttggctttgccctctcatgctcattataggcgttttgcggaacatctgcactgtgtcatagtttcccttaatagaaacaattaacgccgtgtatgttcgtgtgtggtttagtgtgctttcatataatggtggttctgtacatctgtagccgtccatttgccacaactccattatagtatttgcaatttcttttacatccatttaaatcatctccaattaaataatttttttatataattctaatatcttgttgctgttcccttgctgtacctttatattactaccatataataagaaagtcaataagaaaatgcaaattcttttaaaaacatttttagggctaaaactactattatatagaagaaaaaagaatttaaaaaaagttactcaaaagtattgacttatgaataactatactgtaatatataaagtgtagtaaggcaagggacaaaccccaaccgcttctacaaatattatataaaaaaattataagaaaaggatttgatttaaatgaaaataaactatattccaatgtgggacaatgaagacgtattacaatatgcaaaatcacaattattagtaaatgaattagaaacaaaagaaattgtattcaaaaattatcaaatatcagatgatttagatggcggaacagataaaaaatattatgaaatatatgaaagtaaattttatgtagatgaggaaacaacaaaagaagaatttaataatttaattatagaaaatgaaaaactagtaaaagactataaaacacaaaacggattaattaaaaatttaattaaatcacaacatgaagtaaatgaatttgaatacaatgttataaatattctataaaaaaattatataatacactgggaataatatcctagtgtatttatttttgcggtctgctattattccaactgtctatatatagacacctgaagcggttaaaataaactagtggaaaacagagggagctacttagggtaaaataataccgagctacttaggcaattcctagggagctacttagtgaaattagggagagctacttagtcaatctccacccatacgttgccaagcctttaacctaacaatttctcctaggtcgtgtttactaatactttctcctctataatagaaataattactataattaccaaaaaactcagggacacctaataaagctacaggttcattatagctattaccaataacaatgtcttttctttctaatagaccttccatatccttacagtatacaactgatacaatataagaagagtctatatcctcaggtaattcatctttatagtattctaagtatctatccctttcattaagccaaggtaataactcgtcttttaaataatccttagaaacatctgtatatataactatcatcctacccctcctatcctacgtgccaagcgtgattgaaatcaaatacgccttgttttctaatatctactagtaaattgagtacatctatatctccacttggtctgcgtatataatcatctaatgatatatcactaactagattagtatttatcatcctttgaactaagtttataacctctaactcatctaaaccactagctattactctatcagattctttatgaataatagtgtatgttaaagtatacatcctaacttaaccccctatcctatcctatcctatcgtatttcatcctaagcatcctaagttatttttaacctacatcctaagtatcctattgtatcctaccattctcttattgtaacataattacctctattgataagtaatataccttcctcattaaccgcttcaataagtttatctatgtctatatcatcactcttacttccaaactctttattatagtgattagggaatacattactaatatctttataccaagtatcatataagaagtatattaaactacttctatctagcttatccttaattgttttcatactacctctatggtagactgtataatatactttaaacattacttacatctcctttacatattcttccatactatctacacctattgattcaccattacgatattcatgtatccacgtctccgctataaatacacatacatcgtcttcaaattgaggatgtaaacttatttcttttacttcatctttagtatatctagatgggctaacatgtacatctaagttaggattcctattaacatcataagttagttctcttgaagcggtctctttaatccattttaattctgcttttaataaattcttatcataattttcactaaggtatatctctatcattgtatctctcctttcaattctaaaggtatttagagagccgtacagaagcggaatacattttctagtacaatttatcctgaactacttaaccgcttcttaaatgagctctatattccaagtatagctaatacactagctactaataaaaatgttacaagtgaaaacactacaatatttattgtcttatcaaatctatcatacctaattgattgaatcatatctactaaaaaataaatatacatagagatagttgatatactcattaccgtaattaatattgttattcctatcatgattacttatcctccttaaaatatctcttctattattcttaaaatactaatacctgaaacctgtttacctttatgatacacaatagcatcatcatcaactatacaaataattaaatcacccgggaagtcataagatatatccttatatacatacccatcttcaggtttaacatataacattgtgtgaatattaacatccgcttctacattattaaaatcataacttaactctctaggagcatggtcattaatcaatctgagtgtcttagataagtattctttattataaccttctcctaagtatatatcaatcatactatcactccctataagaatttctctatatgttccttaatatgtctagtaactaatctaagtccaccattaaagtcataaggagactctgatatacaatcatcttcagtaacacctataactatatcccgtgtgctatctgataactcctctacatcatcaaatatatcttctccttcataagcttgtatatgaacatccgcttctttctcaggatggttaacactgtacttccaattaggtctcatagtattaatgtcctttaatatctctttcattagggttttattataaccctgcgtaaatagtattatcatatatctcatctcctaaatttgattactcctacttacaatatacagttacttatatactctaagtaggagaagcggaattaaccgcttcatattcctatttagttggtgtgtcaatatcaaacttaaaagtaatgccacaagtagtcttaccattagagtgttcatcattaacttgggagtactcaataggttttatctcaccactacgtaccttttttagtaagtcttctaacttatcttcaaatgtcagattcattattaattcctcctattattttatatactaagtataacatacccgcttcatagttgtcaacaattaattacaattgaagcggattagctttcaatattctcaattatagaaccctaaatgataaggagctacttactattttaggtacattaaaactttgccctagggaaaacctaatactttttagtaattttaaaaataagaatcccatacctatagggttttatattttagtaccacttttcctagggtctaaagattaaaatcctacattagaatcattctaatgtaatatactagattagtgtaccattatataagattattatataataaccgtagattaagaccgcttcagcatagattaacagtagaatactatagtttaagtattgtataataaatgaatattataactatagaataagtagttagggaagtcggtggtaagtaataggctgagtgggagaggtaaaagaattcccaggtacttagtagtagtagtaatagtagtacataacaaaggtacttaatagtaataatattttcttcttcttattagtcaacaatattcgatacttaatgtctatcatgataatccgtaattaactgtgcaataataataatagtcattaggggtacaacaacaactattcctcccctaataataataataataataattacttatgcatcccataataatcttaaataaatataaggttgaaatcctatatcttcgtttgttatctgagtttcaaatcctagtttcttaaatttcttcttcatatattctaattcgtttaaactatatatttgtttatcccaatccttgcctattgaataataataaacaagtcttgtccctaaacacactgaagttatttctaatccttcaagggatatagtttctaactttcttaaatgctcttctacaattttatctaattcatacgttttatacatatctgtatttaacttatcttgatgttcttttctttctttgtcttctttattacggttttgtcttatttgtttctctacattgcttaacttcttctttttaaaaaacataactattcctccttgtaattaccaactaatgtgtataataggtactaacacgctgtctatatagcctaagttaaagtagtacctgattacacttttctctgaccactttgcctttcttacttgcgttttcacattaaatcctaggtctttatagtgctgtttaatttcttttagatattttaatttagataaagaaaactcatcaggataatctgttcttagattcattaccacatatgttttaccctgactactactatttgcaatcaagtagtttaacttattatagatataagttaagtgttgctccttagttattacactagagtctttatagtttttagtgttcttacgtgctttcctggcattcataactactcctccttatttaccatcgttcaatagatacaatatatttagtagctataataacttttttatctttcccatatttagttacttcaatacaatctttacttataatatttttatataaagtaactggggattcatgtttactatagtaagtatactttctattatctacagttcttattgtataatcatgttctatatttatcattagttattcctcctgctcataccctataggtaatagttcataacctttattactataaccgtgtaccctttcccaataatagacatctaagcaatgttccatactaccttgtgcaataggctcccctcttttatataatacataaacatcataagtcattctcccactcctttaacttctgtatatgttcttcaatgtataatatccttttagccctgattataatagtataattaccgttctttttaacccaataatttgtttcttctttacggaactccattagttttaaaaaattaacaatttctttcttacttttaaagtaataaggtaaaatatcttctgtttgaccggcaaaacctctaattgttctttctaatatatacattataatacatctcctgtaatttctatttttattactaaccctgctttctttaaactacatttttctttaacaagtatccaatctatatcaatgtgatttttaagagtaccattaggttttaaatatgtcataggtatccatatattttggttcgtattatttattgtaaatctcctagctcttgcttgaccataccctctatcaatttgttgtaaaggtatacctttataatattgaatatcaaaattacgatttgtactattataactatcttttttatcatgtataaattgtttcatactaattaatcccctttatatattaattcatcatttttatatacttttttacctacattagagaaatcatcacctttatcaaatttatgataaacttctctattaagataaacacggtcttcacctttatctgtttctaaatctacatagtatttcatttcaccaataactggtacagtaacacttcctgacttgatataagtagttggctctctatattctcctgttcctaaaacttttccttcatgattatccggtgtacatcctgctaatagtaaagtactagctaatgtaaataatattaataattttttcatatcttacatacctttcacatagtcttgaactgcaacaaaaaattctccgcctttataacttatcccataaaaagaactaataaacacaaataatgcattgctattatttttacttagtttttttacgaaatcatctcttactatatcagtacaaataacaacatctgcatctgaaccaacatcatctgaataagttaattcccttctagaccattctttaataagccctaattgtaaactaagtatatctttactgtactggtcacttaaaaatacataaatttgttttccattcatcatacttcatctccttgtatactattatataataagtatctacctaagtcaataggtagatgtgtatttatttatctgctacatactcataaaatccaatatcttctctaagcttatcctctctcaattgctgaacatctttagacggtactgtaacaccttctacgtattcaactaattctataaatgctttctctaagtattctctagggcaatcttcattttcccagtagttaactccttctttttcccaattattactcatactatttctctccttttaattctttaatttctaaagtaactattttgtctacatattcctctatagccttataagacaattggtttaaatattgctcactaactcctaatatctctgtcactttctcttggtttcttactacatcttctagtttagtatctacataccctaaagattcaaacatttcatctatttcattcttatcaggttttatttctttgtactcattatagaattcttcagtagttctaaaatatctctgtttacgtcttttgatatgatggtaatcaagtaatcgtctctcaccattaatcgttttaaacttgcttacactaaatgatacaacatgaccaccaatctctaatttaactccatttaatttatctataatcattgtatacctctcctccctatggttgtaaccattcccatttctcaaaccatagtatttttataatattatatttatgaccaaccttaaaatcactaggattaaactcatctgctcttaaagtaataacttttctcttcttcggattatctacacctataagaatgacatctacataatctatatatgcaaatccttcatcaggtaaataagatgaatattcaaaccgactatagtaattatgttttgatattttataaatcatttctttcactcctttatttactataaccctactatataataaaaaactccctttgtcaatagggagtttaaatatttattaattatttttaattatttctctaatttcacttaacgactggtctctataaagtttaccatcttcaaatactctttctaattgattaacattctgtttatttaaccattggtgtaaggttaagttatcttcccatgaaccatctttatatactgctactcgacctttatgtgaacgtttaccgctatctgttttaggatttttatagataagtttttcttcatttttaatcttagcatacgttgctttgattgcaaacccatgagtatcacgagtattgaattggtaagagaagctacctacacctaatacaacattaatacttgcaaaacctttttcttttagtccttcacaaatttgttgtgctctttcgtagttaatagaatctccatagattagtcctacatgttcatctaatactttgtaccctttttcagtttcagtacctccaaatgtatcccaaagtacttctactgcacctttacgttcatattcagtgtctgcatcagggtctccgcaaataattttaacagggtctccactatcaggtctgattactactttaccatcacgttccataataatatcctttaatctaggtaaagttttagtcatgttaccccaaaagtcccaagtatcagatacaatagagaaaatgcctgttggatatatttctgttaacatacgtttatatgtttcgtactcatccatggtttcataattaccatttgcacacattactgagtgttcagtagcagggatagaagcaacaaccatttccttctctacgtctgcattataatacgattctaagaaatctactacaggtactgtatcactacctttaaaactaattgcatgacctgctgaacttaattgagctgtttctaaagaactcataccacgcatactaaagtcatgaccctggaagtccactgcttcaatattacccactgtttccattgcatatttatctagcattttacgcatatcatatgctagtgtagcactagtcattgcttgccatgtttgagtactgataatagtttctaggtaattagttaaccaaaagaaatctgagtgagtattttcaattgtcataacaggtgtgttaggatgaacaacagtaccttcttttaaagctcttacatcaataggtaaataacctaagtcatgtaattgttctaagtgtttagcatcaggattttcttgtcctaatgtaaatttaactgtacgtttgtattcattaataacttcctctttaggtctgttaaagaactctttattaaacatatcaataaaatattttttaacaagtgattgaataccaaatactacaatattatcactgtgttcataatatttattacttctaggtactaatgtactatatacaatttctgtaccttcagggtattgttctctgtgacttagtttatagaagtcacacattaaagttgggtttagcataatttgtttttctccttttatagatatctttcgatatcttttatttgtaattcagttccgttgattcgagctctatgtttagcaatagctttttcccaattatttttagggaacatagagtctgttacaataatatctttaaatcccgaactaagtaatgctccttctgcaaaagctcgttctgcatgagtcaatattaatgatacactacttaccttaagtttgtcaagggcttttttacaaccgacaaatgtcccgccataacttgttaagtcatctagtataatacaattatcatataaagtatttttatctttaattattttaatacctttaatcttacctgtttcaaaatctcgtttcttctcaccatatacaattgaatatgattcaatattagattccattaatatacgttctacatcaaatagatatctatcgtatgcccctttatcaggtaatactatcgttacaggttcttcggacatttcaatatactgatttaataatttaagtgtaacatcaatagcaaaagaatttgtaagtaattcttctgttacagaactatgaggttctgctatccataccgatttataattaaggttattaataaattctgtaatgtatttaagactgaacatattattatgtccttcttctactctatccattctgctataaggtagatatgcaatctctaaaaattcagctttatctttaatatctagttgctctaaatacttagtaaacatgtataagtgcattaagtctgcatcattttcccatctaaagaaaacatcaaatcttaagtcctcttctactaaatactttaaatcatcgtatttaaaattaatctcaccattaggaaacttttcagtaataatgagtttgtattctttatctacttctgaaaatattttaatcattttgttgatagctcctttttatatgttatttggaatacattttctgctgatatattcttaattacatcaataaaccctttaccaatacttaacattgtatctacatctacaagtgttaaattttctttatacattttcctcagtaattcttttacttcaatgtattcacctttaaaaactaacttacctgttttaagatgatagatttcataaatttctacttcttttgttgtaatgctctctaaatactctctcgtactttttagcttatacgctaattctttcacatctaattcaggatacataaatattcatctccttaatttcaattctaagctattttaaggtaccatagagagcacttaaagtaatttaggtactctttatggtaaaaatcattactgctctttatcatacactctaacagtcttctgaacattgctttttttaatttctaacataattttattgtaaatcatttcaatactaaataggaaagctccgaacattgtaaacgtcaacctactaacgttctctctaacatttaaatagtctaagtagaaatggagaccgatagccatccctaagacaaatagaataccaattaaaccaccactaaattttgtaatatagaagtaaatagcatggaacccgataaacattgctagtatataaataaataattccacttataacccctccgttgtaatctgacttccaaaattattcatatagtacacataagcttgtaattcatctaagttaatttcctttttaggataagatgctgatgtcatctcagaaataatgtgtactcgtttttctgtaacactgatgtgtacgttataaccaccactaatacaatctgtaataaaatctctataattcatatttacctctccttaaaataaaatagctcctgctaccgtatagtcatctctttctaaacaatattgctgtaatcttatatagtcctctttgttgatattcgatacattaagctgtaaaactcctttatcagtatctgcattaaattcctcattaacaattgctaaaatatttcctgtgaatctaactttacatggtttattttccttaatagttcttagtacctcttcataattcatttattgtttcctcctttataatataaatcctccaagtagtaatgcaataccaacaccaaatatgataaatagtatttttaaatctacatcatcatagtacttacctaatactaacttataaccactagataaaaataatataagtccaataagtataaccactacagctaccatactattacctccttattagtctaaagatttattaactttacttaatgttaatagtaattcaatcattgtatctcttttttcaaaatccgatattggtaaatcaagatactctttaataattttatgtgcttgtacataacctatatcttcgataccttctgagttacttactacttcatttgctttctcgtgtaatctttttatttgtttattattcatattaacctctcctttttctttatatctaaagtatactataaaaaatacctgttgtcaacaggtatttataaatttatttaatttttaatgatacctactaatagtgcatcaacagatactttatcagcactatataactggtcaatatctacttcatctattaatacaatttcatctttaatatcataatttgaataatcttcagcagaagatactctaaggtgagggaatttatttttaagcatttttctcataggttcatttgacactactaagggtaaatccttttctagtgctaaataagctaatgtgcttgttttacctgtacatctattgagtacttcagaagataaagctacaggtatttccttttcaatagaagatttaaacattgaataatattcattattgatataaggctttagtttttctaattctttagttgaattaatttctttaatggattcaataaaatcattgtcagtctctacctgttcttctacaatagaaaaaatcttatcttttaattgtaataaaatttcttttggattattactactataatcaacagtaatttcagttgtaatatatctcactgttctagggtctttgtcagctatatagcttattcttatctcaaaagaatctcctttatcaccccaaccagtttgttttttgatatgagcaataatactatacgtttcaatttttattccttctaaatttaataaatgatttgtaatagttttattagacacttatttttcctccttaaaatatcttgataattctatatctgttttagtttggtctcctacaatagcttgtagtttattactaatttctgtatatagctcttcagcacttaatgtttcaggtctctcaattgtaatagctgtatctaataaatgcttacctgaaagtgtcgatacttgagcttctaaaaacaatactgattcatctatagtatctatatctaaaatatatgatgaactagcctgtaggaatcttactttataaccttctatttgtaatactttgtcattaaaaaatcttgctattgattctgctttcataattaattttcctccctatcatcttttggaataaaaatctgaggactatatttatcttctagtactctaatagcttcttcatactgagatatcattgcatcaaagtgtcttagttgtaactgtgattcatactgttccccacctttagtttggtactctgcaaagctcttttcctcagttattaattttgctagtgcctctcttaaagcttgtggtggtgttgcaatataattctctccattaatatttgattcatattttgccatttataattcctcctttaatttctactaaacatacttcctattgcactgattaaaataaatattccgatacatacccaaatacttactttaactccgaatgcagataatactagctgtaaaatccatgccggtaaaacaatacctaatgcaataactaggattacaattcctaaaattaaaataaaatgcttcattagttaacctccttttctatactgtaacacactatattgtagttgtcaacacttaaaagaataaaatcttaatttcttcaattacaactagtatacctataggaataaatgctataaacatgaatcccataccaaatactgtagcctcttctagagattcctcatcattgaatccattatgattttctcttacatgtttatagtaaactacaaatgcaagataaggtgctatgaaaccccaagttatcatgccaatacctataaataaaaataaatattccattatttccctccttcaatctgctctattgcttcatgatacatactaatgtattcattgaatgcatccttataaataataagtgttttcttacgtctcttgtgttttacattaaaacctaattttttcatatactctacaaatatcttttgttcaggcttagataaagtaaactcttttgttttagggtaataataaacatgaccaataggttgataagggctatgtttattatgtaatttctctactttaataattaaatttttaattgtttgttttctaatcctagtcttatataagtctttacctttgaatttctccactatactcacctgctatacttagaatatcatcaaaactatatgcaatctttccttctacatcataacctacattaatgtggtaatcagtatccattagttgtgaatgtatatgaccatgaatgttaaacatattctttcttccaataagtgttggataatgacttagataaaatcttttaccttccttcttaagcatatcagcatacttcactgtgataccattacgttcatatagcttaacaagctttttatggtcatgattacctgcaatcaatatcatctctttgtaatttagcctattaagtatttcttctactttagatggtttcatattaaagaagaagtctccgatattataaacaatatcattatttgtaattgtgttattccatagttcaatcaaaccttcagtcatttcttctactgaattccaatgacttcttgtaggtgcttcaaattccctaatattatcatgaccaaaatgtaaatcactaacaaaataaatcatagtatgtcctcctccttaaacaatttgtagtatcctgaaagtacatttatctttcttaacggcttatcaaaagggaatgttaatactctaccatctttatagtgtatttggtcatacccatcataggctgtaatgtctccatttttatcacatgcatacaatacgtaaccttttaagtaaacattcggtatatcataagctttaattacattatttttgtctataaattccattatatcactccttattaagttcaattaatttataaagtccttctctttctaatttgtatgaaagcaataccatattctccatacgtcctgtacctatgggagaaaatcccgttacactggaaacatctacagatgttaactctaaactatacattttctgtaatgtttctacaaccgtacttttctctgcacttattattatcttacttgattctttatgaattaaagcatacttactctcaacatatcctatgtgccctagctttctccctggttcagggataccaaaagattctctttctcttcttagttcttttttctttaaccttgcttctagtactttaataatagcaagaccaactaaacataatactaataatagacctaaaataaaaaatgcaattaccattattgactcatctcctctaaatacatagttaatctttctataccataggcatctcctttttcatagtaatgaacatcattatatgattcactcaatagacctataactaagccatcatttgtcttgctaaattgtcttaggttataatcatgcatgttgttatcttcaagtaaaacaatatcattatcaactaatgtaccctctaaggtgtaagttaatccttttgatgttgtgttaatgaattctaagagcttctttagaatatgtttattttcttctttgtaaaatacaataataccattcataaattaacctccttatttcttatactcttagtatataataaaagaaacctaatgtcaataggtttcttaaacttttttatttatttttaaaccctcttagagtaccactttcaagagtacctattttaacagattttttttctttacgttcttgctcttctaggtaaagaatacctaatgagttggctgttgtaactacagttcttgaaatttgacctgtgttataattctcttgtttaattttacctttcttgtacctaacaagtgctacaatatctaaagctaacattaaaaaattatttactgttagtgttaaaattttcttttctctactgttcatcttttgtttttcctccttcgtcttcaaaacgttctatttgttttttaagctctttattctctgcttcaagttcttttactttttgctctaactcttctttagtcatagaattcctcctactttataaaacctttaagttctaaaatagcataatactcagggttaattacatgtaaaccgccccaaataaaactagcaacaatactaactaacataattgagtacactacaaaagctgtcgggtgattaaaaggtacatggaatttttttactaatacccaaaccagtaaagataataccaatcctaataaaataaaccctaaccctactaatacttgatgccataccatagctgaaaatccttgacctaatgcattacttgcttgttctactgctttattcatattaatttcctccttattaaatatctaatttctcataacaatcttcacaaattaaacctgattcctctttttcaatatactctttattatctcccatatatctatatccatcttgccacatatcaatatatcctcgacacatatcacactcagtatcttcatggcttgtgttattgattaagtcactactcccacattcactacattcttcaggctcttcatcatgaccccagtcttcgaaatgcttacaatcctcacactcataagttaatacaaaatcctcttcaaattcaaagtctctttgtttcattttaatttcctcctttaacttgctcaattaaatcttttactgcataaacttccggattaattaatctcataatatcagttggtatacctgcaactattgcgtaaagagagaataacgttaatagtattaatagaattgtgtaacaccatccaataccgcttaagtcatcatagtcatcatacaataagctttcttttaaatccattttaaccttcttatattctttaaggtaaaccttacctaaaaatattgttagtgcaataactaaaatacttacaacaatatctataataccatacgtaatttgatactttactaatgactccattgcttgattacttaagttacctgctttatttccaagagaatcaattctctctaacactttatcttctaacttcattacaaccactccttctctagtcttctgagttccatccattcataaatccaagtacaaacagtactgctaatataaaaattacgaataacataggtcatacctcctctttatttgttaacttaagtatagcctatgtatactcaattgtcaagacttatttcttctttttacttaattttttttgttgctcttttagtgaatctttttgttgaggtgttaacattaattatctctccttatcaaattcttttgttgttttaatcttgtattcttctttaggattttgttcttctaatctatcttttaaatcctctaatacagatacatccctgtgagctttaatttgtctaggtattttctttttacctactttgtcgtaataacataaagcataccactcattcatttatataaccaccttacttaatatattcccattttaatttttctcctgtatccggatgtactcctgcattctctcttagtcctctagcacagtaagatattttactacctttaatacaccaattctgtgcatcttttacagaattaaataccttacctgtattaagacatttaacttttttagttttagatacatgaccctgtttaaatttagaatctcttaatgggatattatgccttttaaatatacgagatacggtagatttacttataccatattctttagctatttctaaagtagtatatccttctctatatttacatataatattatcagtactatagtttttatatttaaatagtaactcaagtatatctttactatctctataattaatatcaggtagtaagttatttaaattaatatttttcttaataaaattaaattccgattttctacaatctatctcaattaatgtaatactattatcaatacagtattttcttttttcctcatccgattgttttgttaaacctttacttaaaaaggtattttctttgtaatgttgtaatccatgagtttctataaccatatttgattcaggtaaatagaaatcaaaccttctattaggtaaacctttaaatactttttgatattcatagttaataccttttacttctaagtaagctattagaaatttttcagggtaggaaacacccgtagaacagtatttacaatagaactcaccttttactagatggtctactcttatagttttaattctattgcagtgagggcacttagcatttatagttgttgtggttgtttttgatgctatagttttagattgttctatatcaactaagtaaggtctgattctttctacactatataatgagttaccttcaaatactcttctactacttaagtaagcgtccccgataccatttcttaagtcccactctactattttgtattcaggagcattagggtatgttacagattgaactacataccctcgttgacctctataccttattctcttttttataatcaagttattaactttctgaccttcttcataaaaataattataataagaagtcattatttttcctccttttgtaacttcttatctaaagttacgctataatcctctttataaaatcctttaattctacctttgcgtcctctagcatgtttaacatacttgtaaacagtacctacaaattgaattctctttccttgaagctcctttagtttttcatagaaagagataccaacttcaatgttaacgtggtcaataggtataccattaatctttacatcagtaactgtgattttaacacatccatgttgattacctttatgtcttctacgctttgagtacttaacatcatctaaataccctttaacattaacttgtttcctattaaaagattttaactcttctctcatctttccacctcctactataattgtaacttatgatagttaaacatatctttagttaatttcttagcaaagtaattaatcatatattgtgttgaagttccttctagcttatcataatcaaaatcaatgtttgtaaaaactacaaagcttcctaagtttctactaccttctctaacttcaaatacaagtgtatcatttttaaaagttttaattttaaattctttattcgtatcaaaacttttagggaagttccaccattctttagttgttgccataatctcaattgcatttgaaaattgtcttctgattgtttctttactcatattaatcatctcctgtacttgttatatactaagtataatacaaaagtacaaaggtgtcaatacttatttttaagaaaatgaaagaagatttattatcattcctagtgcacatattaatgaagcactagagtatagtattgactccttatcatctttaaccttcctagctaatagtaagaaaagtaacattcctgcttgtagtaagaaaaaccatccataaaatcccgcccaaatatttattaagattgcagtaccagtaagcatatagctcatatcatcattaatcaaatcaataatgactacagctataaaagcaacagaagcaatagttaataagtccataggcattaatcccagttccagtcttccatcacaaaatcaatgtaagcttcattttcttcatctataatttggtctttaactacttctatttctgaaataacaaactgtaaagaatctgttaatctacctagcgcaatacgttctgttgttttaataggtaaacgtcctgagtgagggtgaactaagttatcaataacctctactgcttttgtttcaccacttacaattttaatagttccttcatcaaaaaatactttacttgattttcctgtacttgcgcttagtaaacttgcaatactattaatcatgtatacttttgtatcttccaggttttttagtttttcatttagcattctatttcctccttataacattaagtcttcatttagtttatttacagcttctataaaatcaggattcctatctagcatatctacaggattatcaacatcccattctattcctgcatgtatatctaaatatgaaattggtatgtctataataaaatctgcgtcttctacagcttcaccgtaatgataagaattatcagggtcatcttctgcaatgactatattatagttattaaatcttttctctacattctccctgctaagttttgttgctgtcatcttaaccaaaccgtgttcatcatttaaatgattttgtattgtttttattgtttcttttaaaacacgtttatttgtttctttataatgaataattagtatatccatctatacaacctcctaatacaagtatactactgtcatagcattatggatagatttcataatccaaaataagaatagtagtaaggctcctgctccgataacacctggcatccatctatctttccaaaactcaattccaaacatcaatacaaagtacgatacaaatccccatataaaccataaaattcctaataacataataatcattcctcttttctttattttatttatacttttagtatatattaaaatgcttcatctgtcaagcctttaatgtaaagttttttattaaaatattctaaagctttctgagctgtagatacttcctttgtgaactcacgtaaatctgtcatactaagctctacagaacctatacgcattacaagctctacgccttctacaccattatcaaatataataggtgtaaatgctgttttatgtttcttatctacttcagtaacaataatattacctgctagtcttacaactatagtataatctctatacttatctttgtaaagtacatttgtttctttagtcatttctttttctccttaaatcaatatataatgatttttttcttaactcttctaattttttttgtctctcttcgataggaattgaagaaggtagtttattctctaccttcttcttttgtttaggcttacctaccctatccgattcactgtttataaagtcattaaaatccatagtaaatctccttatagtaaaatattgtttactgctagccatattaaaagtacaataattccaaacacaattgtactgatgactgccattatcatagagcaagcttctacatctaatgtagttttacttaataataacatcattagtttatctagtagaagagtcatacctttaaatactaagtagataattgccatagctactgcaaaagctataataatgtatatgacaagtagtatactatcaaatgagcttatcattgctttccacctctttaattactattgtattgtttgtattcttctaaatcttcttgtttcttaatttcactttccttatctaatttctttaatttcttatattcagaaattgttaaaggtctattagtaagtaactggtttttccagtgattaatatcttcaggtcttttcacttcagcttgaagagcccatgatatattttcttcttttacttcttttccactgtaccttttataataaaattctttaacctctaataaatctaaataccacttactgtagtatttgtagttctcttctccaggtaatctaatgtaataggactcattccacacagtatagtcccaaccaggaaatactgctttaaatactaatataggtattaacgctgacagtataccatatacaatgacaataataagtaatatacttattatttttactaaagtactatctgttaagtctttaataatatctccaagaattaatgttaatgctatagctataatattatttattataactatactaaaatatattaagtctcctaatgttctaccggaagggctagcctttagctcagaccaacttatcttatccattttagtattagctttattctttaggtagctctgttttacttcttctgaaactttcataataattcctccttttctgtataatattactatacactatataaaatgatttgtcaataaaaaaagctaacaaattaatgttagcctggttgatttactttacgttctttaacagcaaaagatacacgtttaccgttttttgtttccactgtattttcttcaacaaatctttctgctaactctctagttgaaaagtaaaatgattctaggtcagaacttccttctgttggtgtcataattacagtctttacaataacttcatatacactaaactttggtaatgttttatccataataaattcccctttattcattttctttatccttaatggcttgggctactgcgtcattgattactcgtgccataattctgtgtgcagttctaataactaagaatcctattcctaagaaagtagctaatacgaacgggtcaatagtagcatgagttaaaataataactaagctagctacaccataaaagaataaaaatcctactgtgtaaactagagctaccactagtaaattaaataagtacactccgataaatttactcaccatacctctcctcttctagcaaattagtaacgtattcgttattttgttctaattcttggatataatcaagagctaattctaacattttactttcactaatgtgaccttgtttataatactctaattcattcttgaatttgttttgtgctttaatactaggtataaccataatatctctcctcctttagtaatactatactacacttatttattcttgtcaaccgtttctttatcttttttaaaaagttctttagataatttagtatgctgttctactgctttattatatctcatatatttaagatgaagtatattaatctcactaaaagttatttgccttaagttatgttttgatacaatatctacttcatcattaggatacttaaataccttagcttgtttttgctcagcattacttagctcccagtacatcttaatagttcctctataggatactattttgttcatcttacttactttccatgtaccaagtgctaagacaaacataatgataactgcaggcgctaaaggtgaataaacagcattacctgttacaaagtattcaagtacacgcattataatgagtattaaaaaactaactatgaaaccaaccataatagaatctaatacctttgtagaaatataatttcttgttcctttagaacgtatgctatccttataattatctacttcttttaactgtaactgtatatctctgttagcctcttcaatctctttaattaatttttccctttctgtcattgtcctatctcctttggtctatttgagctatcgacttaagtaagaatttatagtttcgtttaaagttttttgcttctaacttaccaaatttacttttaatacgttttttagctctgtaagctgtacccccttctagtattgggtttagtaagtctacgcttaactccagtattctttcctccgaaagctcatcatctgaaattagtcttacaaatgcatcaaatctttctaaatctgccatttccataattaatctctcctttctatatattaatataccataaaacaaaaagagagtcaagaattaacttgactcaatcactgttccataagtaataaatgatagcaataaagatgacgacaattaatgttgtcatttaagtcacctccttattactttttggttggtactgcttcaaatctatacttatgaattggattatcttctccatcttcagtatataccctaataagcttgaaatttaccccttccttaaatctacttgttttgtagtacctcatatctatgctgttatctcctgttctaccgggcaggtaagtaggtaatgtttccataaaataagctttattattttccacttttttaagtgtatagtcaccgacaaattctacgttcttttcttctttaatctttcctgtgtttgataactcagtagagacttcattttttgctttgtcgtgatacatgaaagaagatatataataagatgagatagaaaaagccaaaacaataaccactagtatatagaatatacttgcttttcttgacataattaacacctctatacaaaaatgtctcctcttacagttataatataagaggagactactattaatttataattttaacacatttatcgagaagtgaacaataaatcattttgtcactacctactaattctcgtaatttactatagtacttaagtaaatcatcagaatccgttagttcagtgtatcggtcaaggacttcattaatacgactttcaaaaaacttattatcaacaatttctagatgagaaacttcttctcctgttgctaatcttaagtcttctaactctacatcatatatctttttgtcatccttaatatcttcaagtaactcatgttgttggtattcaatatttgtattattaatacgtatcaaaggttttaaaacatgagaagtttcatataagtttctaggcatttgacctcttaaatggctgaagtcttctgactctgataataatccagtactaatactgatatattgtcctggttgtacttcagtagactgatatcctttaggtattgtacagatatataacttattaggctcatataaatctttagatgcaggaaaatcagctacaacatcttttaatccttgagcatctagtaagttctcttttaactcatttaaagtatatagtttttcttcttctacttcaggttcttcagaaggagccacttcttcagtgaactcctcttcagatacccatttctctttattacgcatgtcatttaactgctcttgaaatgattttttatttctcatattataacctctttacttactcaacgacaatattatcctcttctaatgctttgtccttaagttcagattttctttccacatggtataaatctaagatgtaatataaaccattcttatgaagattatatttactataaatgtcctgtaaattcatatattgataatccttaataatctctttgactaaatttttatcttttaagatatgtgcaattctttcttctacaggtgatttcttattacgtttacctactttatagtagtttagaactgtgtaaattaatcccatacttaccttagcttcttttgcaatgtaatctaaaggtttaccttcgttataacttgttacaatgaattcttctttaggtgtgttaaactctcttgatgtttctaatggtgtgtatttgctttcctctttagttaataattctttctcttcttgatttaatgaaataaacataattgttagctcctttatttttagtatacatatactatatcataaacgatagaagctgtcaaccttaatctttaactttatttaatttattttcatcaaagagcattgtttctcctgtaagtgcatagaaataattaccattattatctgtaagtatttctttaatcatagcaacatctttttcttggtcttctcttgtatattctacaatagtatctttaggatacttaaccttagttgtttctgaatattcttcatctagataaacatcaaatgttataagagagttaacagatacattatagagaacccaatgtcttttatagtagaatgattctttatctaagtctctagatacttcagtaaatttgtgtttccctggactcattctaacaaggatatctccttggttgtcttgtttaactctcagtactttcccgttttttaagtatgtcatgatatctactatatcgtcaattggcttagcatcttgtattggatttaaactaatctcatctgccattactctaacctcactatctaaattgtatagcctactctatcaagagcttcttttaattttctactttcctcatctaaatctagatttttgtagaattcattttgtagttcttctaatcgttgtaatacctcttcatgtttctcttcaggtataaattctagtaatacttcactcatagctgtatcttgagccgtttgttttaattgtagttctctaagtccaataaatgacataccttttaattgatttccggtaatcttatctttagtttccattgcacgtatcattaaagcagggtctaaagtttccacaaactctaatccctttgcacctttagaaataatcatatctagtacttgaatatcatcataaattgtttgtgtgtgatgttttgattgttcaaatggagaaagttgctcctcttctaatataggagtttctttttccttaatatcttttacacttgtttttttacgtttatcaattaattctcctaaatcccaaccattttcaatagcttcttttcttttacttttatatcttgtaatagctgacttagacaattctaaatcatattctttacataattctataatatcatcataactcatatcttcatctaatgcattatctacctttgaacgtagtaacttattatggtatagcttagataatatactttctttttctttatcaggaacaacttttatatcactgtttttatttcttaaattcttttttctagccattatatagctctccttaactgtcatttatttatggtaactggtgttctgaaaccagtctaacgaacataaacaaaccctacaacatcaactgtttcaaggttacactatataatatatcacaatttctgttattatttcataatatataaatgtaatataattttattaactactttgtataaaattttaatatattttttaactatttacaaagcctttacctaaaagatattttaacttttcataaatataatttcacagaaactagagcaagtagaaaaaacttaactagtttctgtattaaaaacattatgaaaacttcttatataacgtatatttatacttaattatcacatatttataatattctcttagaataaaatagttaatgtgtcgtcaccttttaagttaattactagctcagttaatttatgagtcttatcttcaattttaacataactcgacttaatatctttagtgttaactttaacatatgactgaccacaagcaatagtaataacatccgtgtcttctaaaaagaatatccctgtctcatgtgtattatataaattaaagtagtagtctttacttagtaacttaacacaaaatacacttttacttattaagctattgtttctgaagaatgctaataatttatcagtatctcctttagataacttatcttttttagagagcataccgaagagcgtttgaccatcatatagtttttctgtagtaagtaagtatacaatatgagtgtaaccatttaatggtgattcttcttctactttatacaaacgtagtttaatatctttagctatagtaatatcttggtatgttacttcaggctcaataaaagtacttacaatatctactttcttagtagaggttaagttagtacctctagcaagtaaatctgtcattagtccagtctcttctaactcttttttaagttgttcagttctcacatagccaagacctgaagaacctaattgattattcatacctactacagcctgtttcattgattctactacatttaccttattaacaaactgtagaccctcatcttcattacctatgtcctcaatgtaagattgtactgtaacacctgaagggaagtaatcactatcgtaagatacacctagtaattctactttaccacttgttaaggtcttgtataaggtcttaatagttgtgggtttgtctacatgttctgaaaatccttttaacattatttatctttcctttctgctttaactctatgtcttgttttgaatataaatatcaaatgtttacctttaaatgttctttgttctctgatactacactttccaataagttttttacctctatgaacataataaactctatctgtatgcaaaatagattctgttttttttcctttttgcttaagagataagtaagtttctttaacatcaagtgcttcactaataaggtttaatgcatactttttctgtaatttcacatctgtacttgttacgttatcaaatcttttaatgaatagtatacgatattcaataacagatgttgcatccttaggctctgaaggctttttagcaaagaaactattattagctcctgttaaagtatttgtaggggcaaagttaacaggctgatgttgtatctctttacgtctatttggtttgtctttgctcattgattacccttaccccattcttcatagtattaaagaaatcttcttctataacttcccacctattattataaccatagataacacctcttgtaaagagtttataagtattatctacccctacataatgaattatttggttaataatagcaggttttttcattcttttactttgagttgtttgggagaaattaccttcccctccactatatctaccactagcattatagctataccctgttctatacgtatgcgggtctctaatcaatctaagtattgtcattaagtttgtcttccataatatattcattgtatgataaggacttctatgtggtgatggtgtagcatctttgtatttacctacaacaggtttgcctttaaaactaatgtaactcattatacctacatgattatgtttgtaccttttaagtatttgttctactttaggtacatgtttgtcatggcacattacatatacatacttacatactagactataatactttaattggttatttaatctttgtgtagagtctcgttctgtttttatctctatacccattactgtaccattacggtctaacactaaacaatctgttctgcatttaccttgacaaataactttctcattaaagattcgtatatcgtttatatcactagttatttcatcgtctttgaacatgtgttttttagttctgataaggtctttaatatctttttcataaaacttaactacatcattagacatttaacctatctcctttaacccttttgtagtactcaacaacactttctagaggagtatatgttctattccacttaacacttgttagacctataaaaacacctgtgtattgaccatgaacgactttagttggttccttttgagaatagatagttctatccttatctctttcaaaaaatcctttaccggttttacctgtaactgtatctgttcctaaaggaataacattagctacaaatatagggtcttctgtaaccttcttaggatacttacgttgaggcatcatactcttaattaaattactaagtggtgttcctccaggtattgtacgttggtaaggttctattctatatttcttctgaggattttctttttcctctctgtcatgtatgtcatatacaataacatactcagacatttcttcttctacatgttcaataaagtaataaggtgtatcattgaaataatatacaccctcactaattctcattgctaatgagctattatcaaaagcactaaaattaaaatccatttttaagccacctctatattaatataccatatatagtaaaaagagtcaagtaaagacttgactctataagaaatccttttccatttttctaatagtaggtacaatatcttctacatctgttaaatattgtttcactgacatactaggtgtttctttattaattaaacttactgagtatggctgaccttcaggatggtctaccataccgtttgtcatttctttcaagaatccatcattaataacattgaataaatacttatcattacctttatcaaattgtattgtataaatatttcctttgtcatcttgagactcgtgaatgttttggactgtatcatttttaattaattgctcataaatatcattgaacttcattattatcctcctgtgtttgatactgtctagcttttctagcttggaatattgtaagtataaatgaccctacaagaccaattataacataaactagcatgtaaataaagcttgtaataataacaccgaaccctgattgtgcagaatacaaggaatctctaaaaataatacttagtataataacaataacacctactaagtaaggtactatcacatgatagtactcaaagttacttagtggaggttgtccttgacttaccatttttttctctgtagtccataaatcaaataatctaaagactatgttaaatgttgcaaaagttataaacgctacacctataataaaaattgtatccatttattaaccatccttaatctaaaaatactgttttaatatcaatatctttattttccttatttacaaataacaactgctgtgaaggtttagtttttgataaatgtaactctttagcatagttattatatcccatcggagatgaagctacaatgtgcattctattaaaatcttcttgttttactgagaagtgatgtacatgacctgtaattaataagtcaatatgactatctaagataaatttattgatatgattacctttaccttttaacccatctccgtgattaatgataatagatttaccgccaaaggtatctctaatagtataaatatcttcacggttatcaataatatctacaccatttaatagcccttgttcttggaataacaataaagaatctaacactacataagcaatattatcattataaatcttctgattcttgttaccttgcatacggtcgtggttaccaccaataataccaaatcttaattctcctgaaactacattagatagtacattcagaatatcaataagtaatcgagtacctttagagatttgttctgctaaagtaaactctgtttcaaatgcttggttaacatctctcatattaatatgttctactaagtctccgacaaagtaaacagttacattagaaatttctctatcttcaatttctttaactgctgtattaataaaatgatttaatcttgctttaagaacttcaaaatcatatttaccattagtcatatcagatacaatacttccaatatggaaatctgatagtaacacaattagctctgtatcattaatattagctttacttccgtgatgttctactaatgtttccccttgtaattctttaaccatatgttctttaagttcatcaaacataatttgagggtatgcagtatgcctattgtgcttacgctgttctcttaagtgagacaattctttttctttagctactacataagtagatacttcttcatggtagttattaccttcgaatacttggttatctgcaacatcttttaaatcacctaacgttactttacctttaattgctttgtttttaagttcatttagataagcgtcttgtctaatatcttctacaatttctttaaggtcatctttaccgattctatctaaaccaaactctttagtaattttattaaacttagatgttacaattttaccttcatctttaaataatactccaataataactgcttgtacttcttctattgttttatagttactcataactgcttcctttctctcttataaacttagttatttgatttcctaaaatattaatgtgactgtttacaaatgtatggaaaatattagaatcataatcatgttctacattgaacatactagctattgctttagcatccatacctttaacataaaaagtcagtatatcattattagaacgtgtctgtgaaccgataataacaataccatgctctttgtttgaaagtaaactataagctagaggtaatttataatcaggcagaacctcatataataaatatacattaccattattatagcacttttctcttaccatgtcaacttcttttttgtaaaaactagttaaatcaaatacatcttcaaaatcttgaaagttataatacttagttaaaccttctgcatctccctctacccatttaggaaaagggtctttacttaactcaactatctgttgtaataatgaataatattttttatcagaatcaacagtgataaaagtatcagggagtaaccctatatcagagacataataaatatcattattcttaatataatcatcaatatctgaattagaattaataaccttattaaatgtgatatcatcatagatgaatcctgctaaaacagttggttcatcttgtattgaaagcaatccttcttcaaatgtatctactttctcgatatcaaaaaagctatcatactcatataaagtgtctgattgaatatggttggagtttactataattcccataccctactcacctactctttcatataagtaacctttaacgtctctttcatcatctttagaagcattttcttgtccgtactctttaactctgtaaccgtagatgtgtaggtaatcttggatgacattcatcataccttgaacatttaaattatgaacagaaacagaatcaaactttactacaatatactgctctttgttttccattaatttttttactttcgtataatcatatggatttctaaataatattgttggaatatccattactttccctccttttcttaattcttatatagtgtatcatagatattataaattgtcaataaaaaaagaccaactttttagttggtcttaactattatgcgtctcctgaaggttcttcagcaggagttttagttgtaaattcaggaacatctactttttctgattcacctgaatcattagcaaatgctactttaaaagctcccttagcataagtttttccggcttctaagcctgtaatagatactgtagtagctccatcgttattagctacttgagagcctacaacttcaccattactataaacttttaatgtcttttccattctttattgtcctcctatgcagtaatatctgcgctattttcaccaggttcaactgttacgtctacaggtgcttcaggaataggttccttaactgttacagcaacaatatcagtgtgactaccatcgtcagtagttacagtaacattagctgttcctgcactaactgcttcaattaagccttctgatgttacgctagcaacacctgatttgtctgattcaaatgacacatttttgttagatgcttcactaggcgtgatagttgttgatagttggtgagtgtctccaactgtaaggtctaaactatcaacgtcaagggtaactgaaataactttaattgcttttgtcttaaactgagggacatcgaccttctctgactctcctgaatcatttgagaatgatactttaaaagtacctttagggtagtccgtattagcatctaaattctcaatcgtgattgttgattttccttctgttttctctacgctgtttagtaactcattacctttgtataaatttaacttagccaaatttaccatccttatctatatattattctgctgatacgtctgctccgtcttccttaggagtaacttgaacgttcttaggtgctgatggttctgaagtgtctccttgaccttctcctgaatctacgcctttaacgtccttacgagcagggctagcagggaaatccgcaattacatcttcatgtgcgtgctctaaactatctttaacttcatctgcatcattatctgtagggtctacaatagataatacatcctctttgttgtttgcaacaaatacgttataaactccaaatttgaaacggtcttcaacgaaagctaagaaagcttgaataagttgtttacctttatctaaccctttaatatcttcagtacggataaatgagtgattataagggtctactactgtgtttactacgaaatggatattgtctccatcagtgtaagcaataggtgatttcttcattacatttaatgtacctttaccatctgtttgtacaggatataagaataattcttctccctctgaaactactttgtacgcatattgcccttcatgtgtacgagtataaccgtcacggttaactttaacttgtaaatacttatctgctactgtaacagattcttgctgtaatacatcattaacattctttttagccataagcttaatctccaatctttattttagtaatctattttaaagcattctataagacatagaaaaagccttccctatgctttattattgaattctcgataataatataacacaaggaaggcactgtaactagttttcccaaatatgattttcagtattaaccctatggttatttaattctttcttagcatagtactcatggtatgcatttattttaaatctaacatagtctctgagttctgtcaactcacttgctacttcttttcttttcatatcaaacttttccgctacttgagaaacgataaaggcatcatcttctctttcaggattaataagtaattctttaagtaactcactttgaacttctgtaaattctatatcatcaaatacataactcataatttgattgtcctcaaagtcttcatttaaatcttctgttaaggactctactgtataatcttttttaccaataatttcagtacgtttatatttttcattcttcttaacataactattttgaactcttaaagttagtttagctttaatatatccaggaaaatctactttacttctaatattatattctttaactaatttaataaattgctcgtcaatatattctcttagttcttgtctttcaaaatcattagataaaattcctgcgtacctatgatataacgaccatctaaggtttttatatctattaagtaagctatctaaatctctttcaaaatcaacaggtataccgtctatatctattacatatctattaccattattagctttcttcataaggattagccccctcgaagattattcttactttgtgtgatttatctttaacatatatatcagagaaatggatagtcttaggtactttaacttcttcaccttcatgtctaattaaggaatatcctcctgcccatctatctgttacatgttctatatacatcactgtagaatctgtataagggaatccaccttcttcaatgataattgattcacctttttcttttacttcttcaaatttctttgctatatctttataaggtaaaggaagaacatctgaggaatttgcattccccaaagattcttttacctgattcatgtttttatctattaaattatccatctattattcagaatccttttcttgagattctccttttagttcttcctcttgttcttcctcttgttcttcttgtttattatctgtagcccattctttatagtagttttcaagagcttgatactcttctaattgagttacgattactttgttattaagtaatggtgagtaaccattagggaagtgttctccataaactctactaaacaattctagatataactctttattatctttaagcaccggaacccattcagcatctctaagtttaatttcctcaccattcaatgtaacatagtttctccatgctcctttggtaattaaacctctttcaactgcttctttatatacagtatgttctaagtcgataccatttaataagatagggtcatcttctttacctaccatataatcagatagtaagtctgcttcagctttctgacctggtcgtgataatttagatttcttagtttcaatacgcataatgtgaccatggtattcatctttaccagttaactcacttttctgttttaactgagatgctttatgaaccttaatacgtaaactagcactatgttcaaaagctctaccacctgtagatttaatagggtcaccatacatacctgcattcatatcatcacgggcttggttaataacaattaaccctgtgtttgtatcatttagcttaggtgttacggcattaattactttttgagtagctgatgccttaagacccatttgcttctcatcaataccgccatcaatctctttctgagttcttgtagcccctaatgagtcccaaataaatacaatcggtactcctggaatcttttcattgaaagtgtcaatccagtactctaattctttacctacttgctctacagataattctactgtatttttaagtctaccttctcctgattgaatagagaatagttttgaaacatctacaccaagttgctccatacgattgttatctgctgttccttcaatgtcaatccaaatagtgataacacctaattgtgttgcaattctagataagtgaactgcaaaagtagatttaccactaccagttaaaccgtaaacttctgttaaccgacctaatggaatacctccacctaaaatatagtcatactgaggaaccattgtaggtataacgtttttaatatctgctctgtttgtatctgatagcaatgttaatcctaattctttacctaaatcaattgtatttaaatctgttaaatctacttctttacctttttttgctcttgccatttaatatcctcctagtaattatatctcaaataaaagagtgctctaaggcactctatatcttataggttatctaagtctagaccacctaatacatcgtcaatactttgcgtttgtttttgttttggaggctcttgtgtagtttgttgtggttcaggttcttgttgtgtattttgaggttgtgtctcaaaaggtacctgtgaatcatcaacactactaacatcaaaatcattgaatgggtttgaatcaggttgtgattgttgttgcgctaagttatcccaatcaacagaacctgtgttacttggttgttgtcctgaagaagttccttgaccaaattgcgtattattgataggttgttgtgtaccttgtaactgctgtccttgaccattactttgaccttgttgtgcatactgacctacttgaccttgctgaggctgattaggttgtcctcccatattacttggcatttgactatctacatcttgttgcgtaggtgcttgtttaggctctgaaggttcttcacctaagacatttgtttcacggttaaatttaaagttatcatgacttaactctgtgttattaacattattgattaagaagttaacaaaattaggattttgttcttctgttggttttgctaattggtctaggtcagataattgttgttcccaaccttgcggtaacgcacctaaaggagcattaggataaacacttactttccatgacatttcacctttcttagctttaacaatattaactaagaatgcttcatttgctgagataaagctatgaggtgcattaggtgatggttttaacatagtgtcttttaagttagctaataattctttatatcctgtgttagataattccataggttgaatcattacatttccttgagcatccgtttttggttgaatttgaccattgttattaaagtattcaataacatgaatgtaatagcgtactcctggtttattagggaatctactaaattgaacaccatttgttatccaatcctgaatgtatgggtcaaggacagatgaaccttcttctgcaggtaatgttaatcctgtgaatccctgggaaccatctttcttagaatagttaatacctgttgttctaaattctttaaagaaaacatttgttccttgtgcaggaggtaatactcgtacaaaagcattttctttaacaaccttatttccgtttgcatctttaatattacctaaacgtagtacagggtttttaggtttgtagctctctacattattgttaaaagaactgttattgctttctaatttgcttgcctcattgttaataaattgattgaaatccataattatcttttctccttttaattaatttacttatttattataacatagttttttatatttgtcaattatattctttactttattttttaatgtgaaaatggattagtaattccaccatttttatttgtttgtcttaattctgcacctaattgaatcatcatatctcttcttgtctcaaaagcttttacaacatattgaagttgtttaactttataattccaagcctcaacaactttaagttgttgttggtaagaatcatgaatataaacactagattcaatcatatctttagtaggctttttaccttgttgttcatactcttgtctaattgtaaggtttagcttactaccaattgtttctaggtttctttgttccatttcagaatatgctcttaccttctctaatatagaagcccaaaaagcatatttagctgattgttgcataaagtcctcttgtattgtatactctgtaattctgagctcatctgtaatatcaaactcttgtgagttcccatttctatccttaatagtaaagtttgtaaaatctagggaatcaatgtgtatttccatttatcagttcctccttttaaatattaactgagatactacttaaaggtaaagctagaggatattcttcttcaagacttgccaattcctctgctacttctccagtagatgactctgttggtaaaactgtagaaccatgtttattttcttctctattatagaatgtaacaacaatattcatctcacctagctcatcctggtacatgcttgttataatccattcatccatagaacgattaaatctaatctctcctgtattcactcttttttcctccttatatttattacttatatagtataacataagttaaatatattgtcaatacttttattaaatttcttggtaaatatgtttttcacttttaacaacgttagtagccttttcaaattgttcatctgttagtttacctgactctttataatcttctagagtctgtaaattcatcatatacttaatataaccttggtaagaattaaatgtatctatttcttcctcatcatattcaaccatatcattatagtttaaccctatttccatatcagcttcaataggatattgtacttcttttccatcaatttctgcttttaagaaatcaaatggtaagttttccataatatgaattgtcactttagccataattttagcttcttcaggaggacaatcaattaagatactatcatgcactgtggcaataacttttgattttaagttacgagattggataaaatcatctaagtaagttaaagacatgtttgttaagaaactacctgaaccctggataatagtgttaaatgactgtcttagtccttcattttttatctttttatctgttgattgggctgaacggataaatcttctatgtccgtgcattgtatcaacataaccatattgttgcacaaactcatgtacattgtcaatagaagtttttacactcggttttgtttggaaatacttttcaaatatttcttctgcttcacttacttccatattatttttacctgcaaatgagaagggtgattcaccgaaggctaatccgaagttaactgctttagttgcttgtcgttcttccttagttacctcttctactggtttattgtaaacaatacttgcagtagccttatggatatcttctccatttaagaatgattgtagcatatcagggtctttagtaaataatccaataatacgcatctccagggcgctatagtcggctcctagtagtactccattttcaaatctagaaacaaatgaacgtttaattggatgtttgtaatcaaacttgtttacatctgatgtgtgtgccggtaagttttgcaagttaggattactactacttagtcttgatgtctctgtacctgtctcagaaaaagaaccatgtaatgttcgtttttgtttgttaatcatattaggtaatttcttagtaaatgaattacgttttgtctgcatactagcatgatatttaagtaactcaagaagttctctaacatcatcttttaattctaaattatctaacgcataaccaatagctttcttgtctgttttatagtcctgccaagtaaggtctgcttctttaacattagcattaaatggtttttccttaacatattctttatcataaggtaattgaattcctaaaatatcataaattactctacctttatggtctccggaacttggggaaaacatccatttaccgtctttaaatttatctctatactgatggatatctttatctctatcttttggctttttctcatgttcttctaacgccatttggtaaagattgtattggtattcttcaaattctttaacagcccagtgctctctcattgtagcatgatttttagccatctcagactcgtatgactcatcattttctttcatataatctaagtcacaatataaaccatttgattcaatcctagctaaagacttagtaagtcttggataattaacttctaataaatgcattgatttaggtctatcttgttctttaagtttcttaactacatcacaatgaattcttctacatacatcagtatctcctgatgcgtatggatgcattaactcaataggaaaccaatcataattaaagttacccccatcaatatcattaactacatcttttacatctctatactcattaattaaattaattgcagtatttaatgtgtaagacttagcgtagtcagataaccccatgtactcaggtgattgttctgcaatacttataaactcatcgttattcataactaaattcatatttacaatttcaggtgaaagacctagttgaatatactttttctctaattcactgactctaaatttcttctcagtatcatctaattctactactgtttcatttagtttattctccaaccactctttatattcaggagctttaacatcatactctttcttagcaatctttttattttctttctgtatctctttaattttatctgagaagaatctcaataacttagtaacaaaccataatttaaagtcttctaatggtttatcatatcctccgacatctgtaacctcataagctaaatcagataatcttaaagattctttaacttcttgggtaacagctaggtaccaacctactttagtatcctgaatgctctcaaaatctttaaagttctcagtactcattaagaacttaatatcatatttaccattatgtgctactttaatatcttctttactagctaaccagttcttaagtaattctaagacttcatcaatatcatcttgaccgttttcccagttaaagtctgatttgtataaaggtatagttacaccttgaccatttctccatgatagagatagtactaaaggtttacttccttctttatccggttttaatgagttagtctctaagtcccatgcggtaatatctacgccatcataattgtcgttctttacttccttattgaatatttctcttactctttcaatgttatctaccaactcgtaagatacttccttaggtttaaatgcctcttctccttgctctacaaatttaccaactgtttgtaaatctgatactacatgacgttcactatttttatttacattagtatattcaatactgtaagtaggtagtacccacacgtcatgagaagatgtttcattttcaatagttactttacttggtactcctcttactttaccaatagctgtaacatttaataggtatttaacgcctagtttacctacaggaattatcatatcataagaattatcaataataatattattcattctctcatagtatggctttacttctgcttgtttaacatcttgatatttaataattttaccatagtcatttctgataggtgtaggtactgcattgtagagaaaatcaatatcataatctctgtttgttttatctctctttaaattagaacacttctcaagtaatttcttaagtgtttttccattaggtgtatttagtacattagatttcacactcccatctttacttacagaaaaatgctcttctctaatgtggtcaaataagattaatactttcatttaattcctctccttttttaacttaataatactataccatatattttaaaccttgtcaataaaaaaaagaagagaattatttctcttcttcattaagcctatcaataacctcttctagttcttttagtggtttgaattttatagcttttctattaggtaaatggaagtattctttattcagaccatcccacgcttttttaccttttctttcaataacttctatttgcataaatttatgattctttactttagtatatccttcttctagtaagtcagaaatagcatctgtctctgcacttagtatttcctctacatcttggatatagtaacctgtattctctgatatctttcttgctatatctcttctatttgctgtactcatataatcaccttatatcttaatctttcgttgttgttttaatttcgtaattacattgtctacatcctcaaaatcacgactacttgttaagatatagatatacattttccatactgataaagatactctaattttatctgcaaaatcgactttgtattcaggttttaaatcataagcttcaccatcaaagaaataaaatttttcttgtttttcatctacttctaatattcgtggaaatgataaatgaacttcatctacatttgttttaatatcatgtaaacttctaataatatcataagggtttacataagggaatactacagaaatatcaataataacttttgtacccatgaatgataaagctatattatctacttcttttgcagtaaaaccattgcgcatacgataaacgacttctgagtcaggatgactagataagtcttttaaaacataataaggtaatactgaatcagtatagtatgtaactttgccaccatgtttacatactttttctataagtctatcattattgtacttttcattaaataacatgtaatgattttcatctctcatgatatatcttctagacttagatattaattcatccatattcttttcaatttcttcttcattaccgtgtgttactttaatagcctcattaattttatctttatcttttgtgtgtatattaaaatatctatcactattatatatcgttaatgttttattctttgcgatatgtcatcttccttccattaaaaaatcctactaccttgtactattatagtatagcacagatagtaggaaattccaaattaaagtgactctaattcttgtaattgcataggtgtaacttggtcttcatactttttaactaactgaccatctttatacccaattaatactggtgtactcatgatatcgaataacttaacagctttttctctatctacatcttcagcatctagatttaatgttaagataggttttttaatgtcacctgactcttgaaacatagggattacactttttaaaatctcacacttaccacaattatcttgtgtaatcatgacaataacatctttcttttgtctaattgctgtatttaaatctactaaactattcattttttccatcttctgaatcatccttttctaatgttttaataatttcgggaaatgaattaactactgtagctttttgtgcttcataaccttctgctaaatcaataagttttaactgtcctgagccataagataaagtatacatggtcatatcatgcataaactctagctgaaaagacttagacgtatcatcagctttagcatccttagagttactgaataacttcatagggtcattgatatcacttacacatgaaaactcatcatgttttttaaataatatttctgctttacttagtaaatccattgcttcttttctatccataatatcttttctcctttttataggaattccttggcagtactgtattctttactatctaagaatgagaaatcttcatctttaatatctttgatatttgtagatttttcatagtctgctttaccactaaagaaatcaacatttcgtaatctatctacattagtttgattttctacaataggattataaggttcaggattaaaatagtcttctcttccaaggttttgaagagctctattaaaattatactgaacatagttgattacgtcttcacttaattctaatgggtcatatagactatgtgtatacgctacttcattagtgtaaagaatatctaataattcataagtttctttatctgcttgttttttctcttcttctgttagaagattataatcatattgagctgttaatcctactgctgaaccatggtaagcttcatcttgagtaattttataaataatagctcctgattgtgtcatctgacctcttcctgcaagaagtaaaggataataaaatcctgagtagaataatgcactttctaaaaaggcactagctactttagccatgtatctatcaaatatagtaggattaggttttagtaattggtcatagtaatatccaataaactgagcttttacttttaaaaaatcgttttcttcgacccaagtatctaatagatagcttgtttctttattacttagtaatgttgtaaaaatatgactataagatttagcatgtatctcttccataccacccataaacgcaaatacagcttggtatttaggtcttggttcgtggtaggatactaagttcataccttctcctccttgcttggtatcgagccctgtgagccctgcaaggactttcttataagtgttcttttcactttcagttaaactattccaagaacttaaatctcttgatacatcaaactcttcaggagtccaaaattgggagattccttgctcccaataaatatcagacatcccgtcatcttcaatattccagtttgttgcttttaatacagcatttttattatgttgttttactttttgtgtaatatccatatctatttcctttctaaaccgaacatgtttcacattcaataacagaaagtttacgtgaacgtgtatagtataatgattttaatccttgttcccaagcataatagtataatgatactagtttattagtagggatttctgactctacataaagtattgtagacactgcttggtctgtatgtttctgaacaactgcgcttgtattaataatacgtttattgtcaatcttataagctgtttctccttcatagaagaactgagttataggacttaggtaaggcattgggtaatatgtctccatatctccatattgtctattctctatagcactaggaactggcataatagaacttgtagcattctgtacataagatatagattgagtaggtgcttctgcttttctataaccattatacaagccatgtacttttactgctttagctaattcatcccaatcatcttgtgttggaatataaaccttatttaagactttcttagctttatctgtcttaggttgattggattctctaatatatcttacaaagtattcacctgtagcataatcggacttctcaaagcctttaaatggttttcctgtttctttagccattaacatagatgtcttaatagactggaagttaatagcactatataaactgtttactaggtctaatgcttccctagaaccataactaatcatattcttagctaaaagtccatgtaaattcattgaacctaaaccgatagctctaatatcatcatttgctttttgaacactaggtaagtaaggtaaatccataatatcagtaacttttgttaatgctcttgtaccaatatctacagattcattcaataaacctttttcaaccacattaaccaagttaagagaacctaatgtacagacaacatctctattaataacattctgattactgtaagagtacggataaatttctgatacctcttgtaattgtgaaatttctgtacataagttactcattttaactttacctaggtttttcaatgggtgattatcattagcattatcaatatagaatacataagggtagcctgattctaattgcgttttagcaatatctgtcataacttctctagcatcatgttttactttaccgatactatcattatctagtaacttatcataccattcatcaatgtttagctcatctaaatacttaccgtacactttattaatgtcgtaagtatcaaaagtatagaaaggtttaccttctttaactaactccataaatttgttagggattgtaacaccaatagataatttatctagtctaacagactcactggcattgattttcttagagcttaataaatccaagatatcattgtggaatatatttaggtaaacagcaccactaccctgtcttacaccaccctggtcataaatactaactttatgttcaatagctttagcaaaagcaataacacctttacttgaattaggtctattacgtactggagctcctttaggtctaattctagttaaatcaattgcaactccgccaccattagaactagcattagctacgctatcttcaacaaagtttaaagactcaattgaatcatctactacaaatagataacatgagcttagttcacctctattagcttgacctgagttattatacgtaggtgtagatggttggaatgtttgctccataagttgtactagtaattctctagcctttacatagtcattttgaaataaatataaagctactcgaacattatgttgctcatagtcttcaacaaaaataggttttttgttttcatcgtactgttttgatgcgtaagattcataaaacttttgccctgccatgaaactagggaatttaaaattaaaactgtaagctaacttagtcatttcatcaataatagtatcaggaaccttgtcaaatattttatcatatgttccttcttttgtcaatactctaattctttctacttcactattaaactttcttgtattgtcttcaatatattttaaatactcatctaaagcttcttggtctttatagagtttattttttccattgtcatctaattgagttatttcattatttaactcaatccattttccatatgttgccatatatctctcatcctttacgctactttatatttattactaaagtgttctaatattggttgtatctcgttaaagtgtcctgattgctctactttagcaattaaaggaatcttaaacatctctgaaatctttttacttgctccacagaaattagagccccattgtttatttcctgtaccaataacttctttagggctcccattaatttctaggaatctttctatttgtttaggtattgcacctttcttataagtaggtgttattagtataaaaggtttatttactttttcttttccactcttaaccctaaatgtttcaaatgaattattaatattaattttgtttactaatctttctgtttgtcctgtacctgaaaaatatacgattaatggtctttctttacttgtcatacttatcttaccttccttatatatcactaagaaggtcattaatcaattcatcttcatgcttacttacttcagataaattagactcgaccttcttgtatggttttatatcttttttgtcgtagcaagatataatataagaaggtgtaaatgaggtcaacccattcatggtagttataagtacatcataaaaaaatttatcttttctaatattatcaataataaaatctgttctcatgacagggtattcattatttcttaaatcttcatatactttttcatcataaggtaaagcaacataactctgagctctatttctagtaaatattaagcaaggtgtcttattcaccttgctactatcattaatgacttgctcccaccatgtatgtggctctctgttgtttagaagaacattatctatagtccattcttctctatgtttacattctactactaaaggaaaattagcttcctgaggtactactatatctccgacagcattattatctttaccccatgaagcaccacctgattgaggagacctattgaattggtatccccaccaagcagttaattctttagctattttacgttcgaatgtatccccttttttcttactgttcgtcatttttcttcaactgaattactttttcattgctgtcagattcagtttctttttgtgcctcttcttgttgtttttgacgtaattcttcttgtttctcttttaggtaagcttctcgtttttcatttagtttatctttagctttacctactttttcttgagttactcctaactcatcttccatgataatcatcattaagtcaattgcattaaatgcatcattaaagtctcctgtaacctcttgagctgttacagcattaagaactttagcaatacgagttgcttcttctaaagaaacacttcgtgaaccaattctatctaattgtttagctgttttctcatcaacttgtttaccatcaacagttccttgtactacagcttcaatccatttctccatgtctgcttgactaataccttttgtgtgtgtgctaatatttttttccattattcttgttctcctttttcttcttcatttttaggttcttcttgtgatttatcaattgattcttgaatgtagtctaatacatcttcattaataagctctgctttatataaagcatcaattaaaatatttaagtttaactcgttattatattctaagtctgtcatctgctcattaacacctaacataaggttagtaatagctttagctacatctgttaatgttgctgtttcttctttacccatttcttctaattgatgttgtcgttgctcattaccaactcttaaagctgtaatgtattcatctacaaattctaaaatatcttttttattatttgacattattttttctcctttattaattacttaattactagtataacataaaacttctctaaggtcaagcctaaagtttaagtttttgttgtattttgtaactctgtatactttcaggtgttactaacacccggttctgttttaataactcaaaagctttccttgttcccatatcatttgcatcttcatcaccatgaggtacaaagtaaactttattaaaatgtgtttttaacttataagctaagtctatattattatctagtgcatcagtgtctaacataatatatattgatgtatctatactaacataatcaattattttttttatttgattctcagttacttgtttacctaatgttgctactccatactcatggaaggttaaagcatcaaatacaccctcagttataactaagaactttttctttcttgctatattcaaattaaatatgacatcttttctccctacttcatcttgtttagcaggagcattaatagatttaatataagggttcttctctatacttcttgtattccagtactggtagtttccatcattatcataagtaaaaaatataatactattccttaatgatactttggattccccatcaactttataaaagctcccattaataacataacctatattgttattaatgatttgttctaaagttatacctctaccttttaaatattttaaaaaaggtataatctctttattatttaagttatcttttaataatttatatccttcaggtaatctaggaggtttaatactagtatttcctttatcttggtgcacacctctaagcattaatataagtttctctgattctgtcaaatccttattattggtcgtaagtaaaggggctctctctatatctatattcttagactctaataaatcaaaagcttgcttacctgtaatgttataataagtcttcataaatgtaataggattacctgattcatcacattttttacaatgatactgaccattactagagtctagtgcttgcttaacatagaacttataacttttttctccacaaaacggacaacagtatcttagctcacctatagtattttcttttggttctcctaattcttgggttaaaaagtcttcaaacctcataatatccttccttactatttactaatttttttcattaataacaacatattataaatttgtcctaagtcactataagttaaatctacagaaaaatcactctctttaagtgcttcattcagttgtgactcttctgatttcatgttaaatattcttaattcttcttctgttttaccttctagatatctagtaacaacaatagttttaagactttggaatataactccaatatctctaaatccttgctctacagtattagcatcatattcttctgttataacaggtaatccatattgtttagctttctctataatctttaaattatctttacgcactgcagggttgtaccaataacctattttacatctatggttgttatctctaataatatcttggttattatcatctaaatcataagatgaaggtaaagtagaacgtaatctttttaattctaagtattctccgtttctacttaacttgtattcataagcattacttagagggtaccaatcaactaaattagcagtcggtacattatctatcgttttatgctccttattacgatgaaacacattaagtgttgcattatctttatctaaaatctttaatttcattatttttcctccagttttgatactccattttcttttactattttaattgtttgttcaaatagtggtttaagttcggtattatgagtaattacaaatatcgtccctactgtattaagtctatcttttaataatttaatcacgttttcacaaccgatagtatctaatccatcaaaacactcatcgtaaagtgcaatgttcgtagatatctcatctttactcataattaaatcctgaattgcaaaactaattgctaaatcaatacgtttttgttctcctgctgaattggatttgtatgaacctccacccttgttattcttaacaataacatcaaacttatcttttagttctcctttagcattcttcacttgagtttggaactctatttcaatatctgaacctgataaagtttgaaggtactcatttgctttctcatttaagaatggtgtaataaagtctaacactactgaacgtatacctttattactaaaagcatctacagcttgctgatatttacctttcttagtttctaattgtactatattctcttcatgtttgtcaatagattcttgtaattcttttttatcttcctcatgtttttctttacttggttcttctctctctaatccttgaacagattgatgttggtatttcacttttaaataagttttattattctctaatgagctaatgtctgatttaatcctagaagcctcttgaattatactgttaattttattattgtgctcccgttcttgttggtcttcctgtgacattttatctttaatttcttgtgatttatcttttactttatcaatagcttctttatacgtatctttcatttctaatacactagtaatctcttgtttcttattctcaatctgattattgatattttcctgttcttttaatttatgagaattatctataggggagccacaaacaggacaatggtcatttgtatctaacttatttagactattgcttaatgtagctatttcagattttagtacttgttctttggtattatattctgagtatacttgatttagctccgttaatttattagaaagtaaatctaggctttgagaggctttattatactcctctgagtgcttaaattcatcttcaggtattgttggtatctgtgaagctagttgctctatttgagcttctatttgcttctcctcttgttctcttaatctatctttttccttattactgttttctatctgaaccaattgttctttatactggttgtactgttctatttctctttggaagtactcatcttttgtagataactgataacctagtttatagatttcctgtcttatgttattttgttgttcttctacttctttaactttctcttttgctacatcttgcgcttgtttatatacatctgtcttagtaatagattcaagaatttctttcttacctttatctgttgcttgagagaacatagggatatctccttgaccatacatgatggcattaacgtaagtattaaactcaataccaaataagtcttgtatttgtttatcggtaacgtcatttgttgaacctgtaatctctttttcattaacgaataattttactttattcttattctctttatccttacgataacgttcaattaaataactatcttccccaatatcaaacttaagtttaacagatgtatttttcttctcaatattatttactacatcatctgcttttagtcctttttcagttttaccatataaagcataagtaatggcagatattaaagttgattttcctgaaccgtttgaatgaaatgactcattggatttattctcaccttcaattagaattaatcctctattatctaactctagcgtagcttctttaattgctaaaaaattattaacttctacttgtttaaatacaaccattacttatctcctttcgtaactctaaagaaacaatgatgagagccataatcaatccagtaatactcatcatggtctacgactctactataataatgcttttcaaagttactatcatcaaaaatctttttcattttacttaaaccatcttctaaaccttcaacattacaaatattctctattactccatctgaatcttggaattgtaaaataggtttacttttatctaagtctttacttactacattactgatatctaatgtattaattttaggtttcatatctttaaacactttccataaatcttcggttactttctcccaatcctctgctaaattttctgcatctgtcttatttagatattctctatattttttcattataaaacctccttcaaacattcaaggatttcttgttctgattcaggtgagtattgtttagcataggtactagcaattgttaaagggtcatcagatacatcactatcaatacgtttctctacagtatactcttttttaatttgaacttcaacattcttatctttcatactgtcatccatttctaaaaccttagcatgatttgctgtaccgataaccctaataaaattatcttccttgattaactgttcaaagttctcaggaatatcttctccttgaatagtaataaatctacgtgtatgaattggaatgaattctgtagtcattttgtctgtatctattaaatgaacaccattagcttcttgttcatcagaaaatgattgttgcattaatgagccaccataaaaatgattcggattttggaaatactgtctgcggtgataatgacctagtaaaatgaaatcatatttatcaggtaataaatcctggtatccaaatgccccttctaatctatgagagccttttccagttaatgaaccttctacacctaaatgacctactagtatattgaccatatctttatcgtaattactattaatgtatgtctttatttccttcgtctcatccccataagcagtaaacacaatattaacattatcttttaaaattgtatttaatgattttattacacttacattaggtagatactcaaatgtatctatacttgaatcagtatataatgaattagttgtagcatcatgattacctctaagtaataatacaggaacctcatcatttttggcaaatgtgctaaatactttgttatatactctagtatctaccgagttacgtttatggaataaatctccaccaaatataactgttgcttcttcttttttagcaatatcaaaaactttctgtaatgcttctatctgttctttaaatctatcattcacaaattcattatcaggtttagcgtagttagtaaatagatgaaaatgactatctgtaaagaatacaaatttcattattaatctctcctttattctttataaaataattataccacctaccatataaaatgtcaagtggtatattttaaaaaattaaactcccggtaatcctccgaatgtgttatttatagcttctattttattatctttattttgaaatttacttgtgtcttcttttccattatctgatagcaattgtatatgctcttgtttttcttcaggtgtttcatctcttacaatcatcttagttggttctactttaagattaacaaatcgttctcctgtgttagagctattacgaattttatctaaatacaatcttaagaaaccgctcttgaattcttcatctttttggtttactgctaaagacacctcaacagcattgacaatcttacgagaaccttctacatgctcacttgtaataacatctgagccataagcaccacggttagtttgagctaacgtccaacaaacaaatccatattgctgtgataatctacgaatatcttcaaacaattttccccctgcatctgattctgaatgatacttagcataaggatttctcattaagtgaggatagtcaataataacaacatcaatatttttatctttcttaattgttgtattgacaataatttgctctaattggtttggtgtaacttcacctggcatatgtttagaaatataaaagtcacctaataactttctattcttctgataatgattttgtattgcatcataaactttattatttaaagacatatcctgatttacaatttgactcttttctgctcctgccatttgttgctcagcacgcaaaaccattctatccattttttcctctaaggcaatatataaaacacttaatccacttttaacataattcttagctaagtttgaagccattaatgatttacctctaccggtaggagctatgattaatccaacttctcctcttgctataccaccttcaatatggttgtcaatagaagtaaatccagtagagaatttatttgtaactaaattactcaatagttcttgtttcttttctgtatcttcgaagaagtcaataaactccccattacctcctgagatgtcacttacttctatttgctttagtttgtctacaagttcatgtagattatcagagtcttcttgtttattttctgcaataaatttaactaaaacttcttttgacatttctgttttaatatacttctctatttcataattaacagattcatctttttcattaacgtctactttatataaatcttctaagtaagttaatgtcttggttactttctcttcatcttccttattattacccataagctgttctactttaattgctaatgcttcatttgacatcttatcggaaatatgtgctgttctctttatagctgtaaataagtaacccatgtcttcagactctgctgaaaatagattcttaggtaagttatctaatacttctcttgcaaaatgtatatccttcattgatttatgaaggataagctcctttatcttcttactcatagttattaacctcttcctctactaaatgtataagtttattataatccaacataccctcttttgtcaatggtattttatcaattaaattatatttctctacaatatattttacttctcttaagtttacctcataccctaaatagtcaccaaacattcttaatatataataagttgaagtatgttgtctcatatataggtattcattaccattttgttctaagttttgtatatccatactgctcaatgaatctttattcactatacctcctagacttaatggtaataaatcctctctcttgattcctttatttaactgcttattgtaaactatatgctctttctgcatagtaaacattgataaccttgcagaaggtgaaatacttgttggtgaataatcattaattatgcattgttttacatatttattaataatatccttttcttctctaggtaaattcttaatttcttcttcaatcatagaattatactgtagtaaaataatatgtttcatatctccaaataatccataggaggcattttcaaggtctaaggcttgttcaaacatagtatcaatatcatgtaaagtagaatttaatcctgtagtatatagttggtgtagatgtaatacagcagggtttttcacatagtctgatgaattaatgatgctatctgtatcacctaggtgtctattcgtactgttaacgcctttttttattcctttaatataattattataatttttaaaatacttatctgaactaaagaagttaggagaaggtattggattaggttgcataccgttctcataataaaatgttacatttttaaatacgttttgcatatatttaaatacattaatatttttatcttttatttttaaataaaaattataaaaggtattaaacattttactaccaaagaaattatcactaacgctatttctaggtaaattttgaatcattttatttctatagtattcagacatatgttgatgatagtcatattcatctttagttgttgccttactcattgctttaagatgacttgtatgtttagcatccatatgagaaatagcatattggtcgtataacttacataagatgtatgctttataaaacccttccgggtcataagacatattaaaaatatctttagaaggataaggaagaccttctgaatagaagttcatatctgctataattcttctcttctcatccttaatggcattatattgtgccatttctattttagtacgtctacgttgttcttttctctcatatctataagaagggaagtgcttttctcttaatgccttagcatactgtaaatcggaagtaataatattatctgtagaattattaaattctttcaattcttctgtgtcatactctctaactaaagttattattactccaccgttttttcctcttttagaaacagtaacgactttattttcttcttctaactttttaaggttattggataaagcagagatggaaacacctagagaatctgctaactctttcttagtagaaatatgaaatttattttctgtagcattttcctctagatattggtatagctttctttgtgtttttgttgccatctcttaccctcctattttcctaagtcttttatttcaaaatcttcctcttcataaattttcctacgctcattagcgtgagtatataaaaatctatttgtcatatcattaaaatcaaatatttgtgttgtattatcgtcttttttcttacgcaaagcacgaccaatacgttgcaatgtttgtcttaatgacttacctcctgcacctaatattagcgcattaataccggatatatctacaccctcatcaataagtgatgtagctatcattactttaagcttaccacttctcatatcatttaatttttctctcctagtttcagagtctatttctccatgtaagaagtaatgctctacatctaaatcatttaacatttctgatattgtgtctccatgttcaatgaagtttacaataatcaatgtacctttatcttgattataccacttttctgttagttttgcaataagtttattcctaaaatcattatttgttatacctttatcgtaagcttccctataatcatcaattctatctatgtcattaggattagctacaggtataatatttattgttggtctagcagaatgaccttcatcaattaaaaacttattagtagttcgtgcaataacattaccgaatagagcctgcaatctcatccaaagtaattcgtcttttttatctatagaccctgttaatgcaattctatataaagctttttcacatgtcattagattattgtaccaagaatcagatttagaatggtgtgcctcatcaactatcataactgtaactgagtctaaaaaatctctcatatcttgatatttatcatatttcttttcgttcttttctctaacaattttttgaaaatgtgcattatgatttcttaagtttaataaaacttctgcatctgtcttactattttggtaaattatctctaaggcacttaatacgttttgttctacttttgttttaggtgttgtgttatcaagtaatacttttagtaatttcttttgatttgttccaccttcaaatttaggtaatatctcttgagcaatctttttactaatattttgtttaggtgtaacctttaccccttgtgttgggtctttaaggtttgcatttaaagtaggtatcattacaactgtaacctgtttaacatcaaatttacctgcacctactttaccaataggaatatttaaacgttcttgtagtctatccgcagactgatgaaatatctccgtagagcctgtaaagaacgctactctttcacctttttctaattgaggtaatagttggtctataataccactagcaacctcagttttacctccattagtagctaagtgagcaataccattgtaaaatgttaggctattgtatactgcttcatattggtaatctcgtaaggtaatttgaccgacattattatcaagcaatgttatctcatcatcaatatcttcttcagataagaaactttcatcacgctcatcaattgtttcaaactggaaattataccttgattgtagctcacctaataataactcaattttaaataaaagtccagtggggaatttatcttcctcataaacataaaaatctacataaccatcccaactacctcttttgtacgcagggctatactgaaaaccttcttgccttgctcctatagtagtatggactctctttaaaaatatatcttttaagtatttatcatcctcctcaaattctacataggtatataagttcttaattcttaatctcattttaatctccttatatccttacacgagttatagtataccacagaatccttttcaagtcaagaaaaaaaagactaggaaatttctcctagtctatggcatattaatacctataattcttgtaacgtattgagttttactattttgtactgcactatctacaagcgtccatgttgaacctttgaaagatacacctactctatagaactccgtgatagggggttttgtatcggttctatccccggaaacaaatgtacctgaacaaacgtaagttccactgccatctaaataaaacttatgacatatagtccctgtatcgtcattacctttagtcttctctgttgtcttatgtttagtataaacttctacataagagtagttactaatatcatctgataaattcttagtagttcctgtagataagaatgattgtgctcctgtccataattctttatgagaaggagatgtttttggtgaagtccaattactacctaccactgaacctgttacatttctaccatctgtacctatagcattgtaaacaccatgtaaactagaagtattaggtgtatctgacatgaataaccctctacaactattagacataggggaaccggatacaccgccttgaacatagaaagtaaaggttgtttgacttgttctatctatatggtctataatagcttgttgaaatgttttactatcactagtataaactaggagtgggaatgatgcactaccatcgtctctaatactacttagtagatatttctccatatcttttggctcaaattcttttttccaggctgtgtatgttcctgtgggtttcttaatgctagtatattctttaccggtttcagcatcagttagtctagctaatctattatcattagcatctacacttaagtctaaaaatccggagcttactccactaggcattcctcctgtcattcccataacaaagtaaacacctggtgaagctatatctaaaatattagttcctgatataacagcatttttattactaggtaatccttgaataaattgccattctgaactagaatttcctgagacaaatctatataacattttaatttggttattgttagtagatagtgtatataaatgttgaactaccttgctagaagtatcaagaggtactacatgtaaaacaacatcaagagattccatatcaggtctatctaataatgttgctaatgttctagcacctatatagtaataaccaggttcttttatatctctaagggctgttatgtttccataagatttagttaatcctttatcatcagttagtttaattttctgtgatttattaaaattataaactaaatcatcggtaatgtcaaatatatttctttcttttgttaattcttctccaatgttattgacctgagtagtcaggtctctaataacattgttttccgttattgtagtaaaatttaatgccatttataattaccccttttgacctaagagcttttgaagcatttccatcatagcttcttgttgttttctcataagctctagttcttcttttaaactatcatattgttctttaggtacagtaatttgttgggattcctcatcatcattgatttgtggtggtacatagtttttattttctataacctcttcaggtttactataatacaaatatctttcataggcaaaattatcaaagaagtaagcaggtaagatttctctattaacttttacttgacctaactccttgtcataccctcctactgttgtaaaccctgttatatatttaccttctcttaagtgtaatactatctcattattacctatatcatatttaacagccatagttttttattccacctttctttatcctctattaattcccataatattgtatacctttatacgttccttttcattccatgatgctacttttgttgtatttgtagacccatctaaagttatagattttaccataccaggttgtactgatgctctagtagggaaagtgcgatacccttcaaaaaagtctacactagaacctgtactatcatttgaaatattaaagtctctaatatacagtaaatttgatgtattttttatatctaatctttttgtagaaaaatgtcctgctgaacgagtccaataagttacctcaattaaatcataattatctaatgagtcatttaagttaacagcttccgtagacccaaaatctaaagtaccttcccatagtaaagtagaagtttctgattgctttaagagtttccaaccttgattataccctccgtagtataatgtataaggtataccttctgtgtcagtaaacaataatttaacaaacttattagctctgtaggggtcacctttgtcataatctacctgaatggttcctctaatagaacgtcccttaggcgtcccggcaatagagccttgacaataaaatgtatgatatccttgaggtactgtcatagctaaatcttttaaactcttttcattaacttcagatttccaccactgatatttaaaataatcattatattcaatatctacaggagagtgaccttttaattcatctttactaataacttcttgccaattagaccaaatctcatcatatttacgaacatcattttcatgtgtaataaatggtgtaactttagatgatttttctaatttaggtaaggcatagtatactacagcaccattacctttactagatgaacaattcattcttagtagtaaagatacgtaattaactttaacgcctgatgctccgattgtattttcaggtatcgtgaatgtgaaagagtattttttccactcagttgttatctcacttgctgttatttctctacgtcctcctgtataaggatttttactagtatcatctacagtatcgtatcctgctaattcaaagtaaactaagttatctttaagtaaagcagggtcattaattttagcatatactgataccgttacagtatcacctacagaaagttctttacccattttaaacctattagaaactactaaagggtacgtattagacccatcatctatctgtactgtattctctcctctaaatctaactcctgaacgaccactattagaagaatatccccaaaatggaggcgtatcccagttatctgttttaatattagaatagctagtttcaggataaacaaataaactatctttcaataagttaggcttttgttcttgtactggtaactttcttatcatcttaaaagttgaagtggagttaaccgggttaaattctactaaagaagaaacaccatttttactttctttgtaattaacccaacctgtatttaagttctcttttggaggattaactagtgttgcatattgagttgtagattcagtaagttcctttacatttaaagtattaccttcattgtataagttaccttcatctaatttaaaactaatccaatcatatacagtaccattagcataagtcttgatatacattttattactactatatggtgaataataaattttataataatttacatttcgtttatccaatcttacaaatcctgccgtagcttctccactaggagcaccttttgaattagttacatagtagttaccactatcaggtatagatgctaaaatattattaaagtcgggttgtgatatttgttttacatcactaaggttaacttctgtttttaaaaagttacctatatcattaactttaggatacatatcttttaacttctgtgtttcagtaagaggcgtgtagttaaatgccatctatttttctcctctctctttctttaattcattgattaacttagtagcttcatcaattttttctttgtatgttttttctaattccttaattgatttttcctcaactgtaggtataaataatttagcttgagaataagggtctctaacttctctaggcatataaatctctccttattaaataaagaggggtcaatcaacccctctagtttattcatccctagtagtaaccataagtctacgaacacgaggacgtaaaaagctattttcagttgataaatctaatctaacttgtagtttagtatttgttcctgatgattttactttctcgtcaatgacatagcgtgtaaactcattattggctctagtagttgtaggggatttagtaaatgttttccaagtttttccatcatccgcagaatacttaggaacaactttagtacctttaggtaagaaagcttcataactaaatcttactgtattgtaaggagcctctgtcatatcaatagctctaccaacatatgaacctgttaactctgttaagaatgtagtgaatgttaaatcactagagctcattaatggtgagatatatctattagattcgaaagttgctcttaacttaacttgtcttgctagacctaaaacatctaaatcttgatagttaccaataggctcccatttcaattggtcgaatgttgtagaagatgccatatcatctagaattaatttcatttcccatgtacatcctgttctctcaggagttaagtacgtagacataagaactattctatctgccgatacatctttaattggttcgaattcaattgttgctgtctcattaaatttagaagtataaataccaaatttaaggtcagagttttgatgaggagtccatgttgatgcgtttgatgagctgaataatacaccttgaaggtatgggttacctgagataacctcattaggtttatcaatcttaggcttagtcctagtacctacccacattgtataatcactgttctcagtaataataacaatagcgtattccttaccaccttcagccatcatagggtcatcaaagtatactctagtttcagcactagcattattagatactttaatatcatcagcattcataactgtctctgcatagattgttttattaggataaccttggtcacccatacctctaatttggataacaacattagattgtttatcacctttagaagcaaagtataatcctaatgatgatatagttctgttctcatcatattggaatgattgtgctaatgggtctactaagtttactgttacacgagttctaataataatatcttgaacggtttttttacgtccttgggctgtgtaagttgtagcacttgtggagttagcattcttaagggtaacttctcggttaccacaacgaatacctgcaggaatagtaaatttacctttagctgttcctttagcatctgtcattattgtaccatcttcagagccttttctataaccagttgcaggtgttatagcgcatcttaccccatcaaataataaatataagttattatcattagggtttagtcctttaacttcgaaggatacatctctgattctaatgaattcaatcatttcttctagagtacgttgtcctcctgattctaataaagtaccagtacgtccatgctctctatcataagcgtaagtttcacctttccacttttgtcctgcatctaactgtaagttagaatacaagtaatgctcagtctcaccatagtaactctcattatgtctccaaaatcgtttcatagttacttttttagttttttgttcagtgattgtaacattttcagtatcaatccagttatcctcactaggtgttagttttaacacaccttgtttgttaggaatattataagggttaacatttaatgtttctgatgcttgaccttgatagattgtacgttcctcagtaaatggtgctgaaattaatctaccccaaatatgagctgttgtatctcctggaataatcttaggttggttaactgcttctgtataagctagagtagcttctgcatcttcaaaactaaatacaattccaaagtcaggatgtgtaatatctgctttgtcaagactaatgaacccttcactaaatactgaacgtaatgttagtgggttctgtccttccatagcaccatcatctagagcatttactgcttggttatactctaagttatctactcttgttttaactttctgtaagtcttccatagacaatctagttattgcaaatgaaatacatactgcttcatctgaatcaggtaatactgtaactgtacctaattgtaaattctcagggtctgtgtttaatggtggtgtaactaatctcataatattaggttcaccaggtaatattgcaatatcaccatacttattaataaatactgaatctttacgagccaagtagtaagtatagtctactaatactactgtttggtcaataggtttagcaccatttgaaggtgtgaagttaatgtaccatttcttacttaacccttcaccttgagttgttacttcataatctttaccggcttccatacgtttgttatacttataagaaacgtagtatgaagtacctcctgaaggttcttgaccttgaggtgaccaatcaatcgtttgaccatctgttaatctaaagtcttctccttgtttatactcttttgtagtaaccccagggcttgtttcagtccaaacttttacaatttcaaatgctgtattatttgaaagaaaatcttgactatcaccttgggctcctcttgtaactcgttctttttcaataagtacttgacctgtaacacgtctaatttcttttacagggctattagctaaactaatagagttattagacttattaaagatagtactttcattttctgctgttcctaagtcataagatttaggtacactaattcttgttgatacgggtttgtctactttaaagccttttacataggctttacctgcatctacaactacagaaacgtggtcatcatcttcagcgttaccttctgagaataactcaaaaccatttactttatatgaacctgactcatcataagtacgttcagctaatactttattgattttatccatctcagcattagttgattgaatatataaatctccatccatgaaagtataaatagttgctgatgtagggtcattaacagttaatgacatcttttcttctaatctatctgcacctttagagaagtaacttggtaccccactagtttggtctaataagctagcatcttcatcaggtgtaacaatacgttctgttaatttaataccaatagtttctttacctacgccagttattttaactgaatcgtcattatcgtaatatcttattttaccgttgatatatacataaccagggtttactgtcaatacattatcttcagacaatgtgaatccaagacctgattgtttatctccgtctttaaaaatagcgtctcctagattttttaaataatattggtctatagactgcatttcatttaattctgcctgttgtagaggtctatcaggattaaataatacttttgttctatctttagacgggtcaaatctatctaaataaggtgaacctttaaaattaattgccatttagaattatctccctttctttaaacttctacaataaatctttctttagcagttgtctgctcacttctattttggaattgtttattatcaaagaataataatgttccagttgattctacttcactaggtactaagttaaatttactaataccactttttgctactaagtccataacaaatcctacttgtctatatgttccaagaggtagttcgtcaccaacaatactactttctaagtaaacccatttagctccttcagctttagcattttcaggtgttacttctacccatgatttattaccataagaaattaaattcttattatcatcttcaggtgatttagaaggtctaactaaagtaactttagtagcttttttatatccaataacctcctgtaatactgttgcattttcatcaggttgcggtgggtttgtttcattagaccacggtgtgctctttccaattgttaagtaaactgaatcagctttactaactagatattttgctaactcaacatgagaattatacgttgcaattgccatattttttaattcctttcatctgttgttttctttattaatataacatggtatacccactaaatattactttataagtataccatattattaactttctgtcaacttatttattaaactttccttaattctactcttcttactttagagatagttgaatcataaggtcgtatatatattctaacatctgtatttaaccttggtttgtcttcagtagatggttttgcaataaattctttttcagcaactccattaattatctctgatggatatataaatgtttcattaaagttagggttagaattgtataaatatataaattctatattatctttaaattctccttcgacaataagtttatatctagtaccatcttctataggctcatataaaccgtaatctaaatatttagaacctgtaacttctctttcaacaaatccatttttaataatgcttgtatttggtaactcctcatatattgagtcaattactttaattctattatcgacattaaatgattctgatgttagtagttcttcttttagctcacttattaatcgactagagcctaacgttaacggttcagtataattagtcaaagtataagctaacatatctaaatcagtataagcaccgacattaaatagagtagccttaataatttcacctgtagctccatcgaatactccgccctcagtgtctttaaccattctcatagaacctagctcaatatctgataatttatctatatcctgccatacagcattaaagtaatcattaggcatattagataaagaaccttcttgattgttcaattcacctagcttaacattccaaatggaacgtaatgatactttagacattggatttatattagaataatctactgtctgtaatccatataaatctattaagttattggtttctgttgtttctccagtactaatatttcctagagtctttagttctacccaattatcaccatagtaagaataatataaagttacattttttaagatagtatccgaattaatacttaaagtctgtatattagttaggatattattaaatttaattcctttttctattacgttaggtttatcttccggagcaggtgagtactctaacttagaggaaccctcagtcaattttaattccgtaattttaactgtattaaagaacactggaggagttgatgctttaccatcagatgtatatcttccagtatatattagtagtctatggtcagtaatagtaggagctgtaaaagtttgagttacggatactttgttacctatagtacgttccatagatttaacaccattaacaacaattcccttagtattactgtataaatatataccatggttatcagaataagatttaagagttgggttattatctgttatttccatatcaaaagataacgtataaactttacctggttttaatactttagaaagataattagttgagtatatctctttagcccatcctgatacagtaaactcttttgtagaagttatttctctagctatcgtatttacacctttataagattgtaatagatttctattctctactgtattatatacatctaattcattagattctataggattattatctgtatctttagctactatatttattgtgctaggtcttgtattttcataattaccaactagttttaaataccctataggctgaaaacctgttttagttataatatctccattagataatgatgctattttaaatgcttctacataagtctctctagatatatctaaataattttctattaatgctttataaggttttattgtataaatacctcgttcatagtaataaaacattaaatctaagtaattaactttaatatctactgaatctcttttacctgcatttatctctaatctagtaaacatatttaattcactgtttagataatcttttatatatcctatattgctaccgatatttttttcatagaaagataaattattaattgatactgtaagccatctattaatagaaaaatcataaacttgtagtttaatttctatactttcatcaggaggtatcacagcactaagatagcaatcaatacttaattcttttatataatcagatacaattcttctagcctcatcagattgtaaatctacttgaggtctatatttactcatatagtccctaaaattaaagttattatataaataagacacaccggaagtagtttgcatactaagctctactgtattgttattcttagtactagtatacatatagtagtcagtaggtacttcttgacctctaccttctgtactagcacttatttggcttacagaggatgtcatacctggattataaacatatgatgttacatatccatagttaatatactgtctacctacgctagaggaacctgttaaaacatctaaactattaattaagctatggtttgttttaaaaatatctgatgtactattatcagtatctttactttgattcatgttaatatgaccatagaatgtatcatcgtatcctgtaaacctatcaaactcttggtatgtttctattttaggtaacccatctaaccacttaataattgctccgcctctaatagtagaagctccatcataagtgacatacagagttacacctgcaggtttgaattcattaattacatctataatctctacagggaaataatcacctatagagacattaataacagcaaacctataatagtatcccattaagtggtcttcaccatttaaatgtgatttgttagtatagaaaatatttgtaaaaggttcatatacacttacatcaatatcatccctacctagataatcttttatagcatctattatagcattattagttcctcttttcaagagtaaatattttataattcttgctctataaacatcatcgttctcatctgtcttacgataaactccaaaccaatccccaaacttatctaaatattcacttgtagatgtctttagagaagattgtaacttactttctatagcatctttctctacttgattcatctcttcattgagtgcatctatcagagcaaagttagggtcttgattatcttttttatttctatctcttcttaataatggatgaagattctttaaaaaattagccacgacttaagtttcacctctctttactttagttctacttttatttctcctgctctaataattccttgtggtggtactataatgttctcatctaggttatcaaatgacacatcatatattagtacatcatcaatattcattatagcttgaataaggtctgtaattattaagtcatcagaagtttttaaattatttaaatagcttctaataacaccttcgatatgtttttgtaatgtatcaccgattctagatttattagatatagttactgtagcagaaacattaacttcttctttttctacacctgtaacatctaacattataccacttggtctatagtcttgtaaagcatcaattatatcttcttttaaggtatctgataaattaccatttctatcatgagcaaatactgtaatatgtcctgtttcttcataaacataaacaccttctacatcaggtatctgcagtgcaccatatcttactgatttattagttgctctacctctagattctacaaaagagtggaatctgcgcttaaaatcttcttggctctcttctttagttcctgtattaaaagaatactcgttattaacacttctaatcaaactagaacctgatgctatagtattaatcgttccttcaggaacattacctgcaacccctgtttctttacaataaacctcaacaacaatctcagtagaatcaggctctgcataataatcaactaatgtttcaaattgctgaggatattcttgtcgtgttgaagtaaaagttgttcctgcgggtatatacattctcatatctaagggttggtagaattgaatagtaacatcaccataagctcttttagattgtcttttttgaaaatcaaaggcttcaatgataccctcttgtataccccaatcaatattttcttttgttagaatatagaattgctctatctctaatgatacagcttctaataatgaacgggaagctgaaccaggagtaaagtctgttatcttgcttgtacctgccattgtcttatctattaattttgatagtatgttagttaattttctagttttcataatttaatcctttcctattcaaataaagcaaaaattccttcctcatcttgtcctaagacaaaatttattgattcttcaacagattttatttccactgaaaattgacctgaataaacattaccttgtattttccaatcaattagattagcagattttactctattatctgatgttaatgttctcaatacttccatttctataagtgtagcttgttcaggtatattaagaccaaataaattatgcaaatctgaaccataattaggatgtaacattaaggaacctctaggagttaataaacgtgcctgtaattgctgtttcatattatctatgccttttacagtatctaaatctccattaccatttgtgctgaatgctaatatattatcactagtaccatgttcattaaaatacttttcatctgcagtaatatttaaatctcttcctaaagctaattcaactagtacatctttatctctagaattaatttcttttgctgatacatctgttaaatcagattctataggtataatcagtgtatcaccggtagaagctaatcgttcggggtctttcattttttcttcatcagtttctactaaataaggatactttaaattattatgctctactaggtctatccaataactaacatcaccatagtatctctgtgctattgcttgcatcgtttcttcatgttgaactacgtgcttcttaaatctcattatacgttagcctcctttttaattagaggtaattgtaattctatagcactaaaacataagtctaaatctcttaagtctaagacaacactattgtagtcatcatagttacctaagtagtcagctacataatttaagttttctcgtgttatactaacgtcttcttcagttaagtattttaaagaacttgggttttctacaaagcaattaacaatagcatatgcttcaagtacaatagactgtagaatcatatacattcttggagcctgtactttcagtaatgtatcgttagctttatggataattgtattatcattaaattctctttctaatacaggtatatcatctgtctttatatttgtcaatactttttttgctaattcacttaattgtagctgtggtgtataaaatttagatacaaatgatacctcttcatccagtaaattcatatgagaagaagttaaatctgtatctagggcatttaaaaatctgagtagaccttgaggttgtggtataaaattattcattagctagatacacctccatcaccgtaacctattatcagagccatattgtcaatattaccttttaatccgttagtagattgtctaggattatatatagaactactagggaagctttgtttaagtctattaccctcattcgtattatctcctgtagatttaggtattgtattttctcttctagatatttcttgattgtttctatctctcgttttacgagcatttttatctaattcttttataccttcatctactctttgagaagcattaggtttaacattaccaaactcttcagtagttacagcacttctatctgcttctgttaatgaaccaataactactaatgttatttcatatctaaaaagtaatggttcatctttagacctagttatctttaacccctgaggagctaaatgaactttataataactatcatctgtaaagttaaaaaattgtaagtaagaaccacttacattaccactgccaccttgcatcgcatattcactaactctactttgtaactcttccattttctgcttacctgtttttaatccatctgcttctctaacaggtctaaaaccagttgtacctgtgaagttaataacttctatgtctttaccataatcttctattacgatatctgattttgttttaattgctgtcgtacgttgtggtgaatctattgtgtagttctcagggttaactttaaatctatacatatcataaccaccgccttctttagggaagcgtaaagctattctatgaagattacttattccatctgattgtggcattttatcctctccttttcagtatgtatataaatctcatactactaatatatcacgaactagtttaaattacaactaaaaaaagacctaaattaataggtctttaatattaaatctttttatattcatctaagtagtttgtaaagaacccatctacacccatttgtattaagctttgcatttcttcttttgtgtttaccgtccatgcgtgtactttaagtcctttactatgggctaaatctactaattctttagttatagttgtatacttaggagcaatagcataagaaccataacttaaacaatcatccatttcactttcagagaatgtacttgttaaataagctaaaggtatattagagaattgattatgaatattaattaatgattctctagcaaatgattgaataattacttggaatctttctgaacctattcctattaatccttttgcttttaattgagttaataattctctatccatattggcatcaaacggacgtttagtttctatatagtatttaacttttgttccgaaatgatttaatacatcatcaagagatggtatcggctcaccattaagagatgtaaagttagtttgtatataagataaagtcatatctcctaccttacctgttcctgttgttgttctgtctatagtagaatcatgcatacacaataacttattatcttttgttaattgtaaatccaattctatataatctgcacctttatctaaagccatttgatatccttttatcgtgtgctcatctgtatatccggttgctcctctatgtcctataagcataaagtctttctccatagtttcagtttctaattctatagcttcgatactaaaccatgtataagggtctgctctgaattgtctgtcaccttctgagtcttggaaagcttcaaactcaaagtaatctccttctttaacaggaataactccactagtaccgttctgaggggctgtagatatagctacatctcttgtataaggtaaccctagactataagtaccatttttcaatattctcaacatacgttgtcctgtggcgttagagtcccacaaaacattacctgcaactcttacttttgttattcctttaggtactactaatcgagtagggttattagaatcccaaaactctgcattattataagtaactttactccaaggtattggcatatattttctcattggtacagtaacattttcctctaactgtatcatagcacctatatgctctcctctatctgagattattttatcggcattgttattattgttctctagttctgttaatctagttttaatgtttggtatttcagttttctctaggttatcaactttagtctttaaggtattaacatctgttttcatagtagggaaattctgatttacttcattaataacagtagaagcatcttcataaaaatctttaaaagtctcatctctaaatttttggaactgtgttataataccttcagttctaccactaacttctgctatctgagttgtaagtctattgacatctgaagttgcttttttagaagcttctatagactcttttgtagactctattaattcttctaaattgtccttacctacaccctcgagaaggtagtttatatcatcgagttctttttgtatttcattcaaattcttcatagcctctgctatactctcatctaagttttctaacataggcttatcatctatataaattccttcatcagtaaattcaaatttatgcttgtcatttttaatatagaatttattatcttcactaataccatactcaatccaaacttgagcttcatccaacattaaatcgtcatcttgtttaataaccctataagacccatcacttgacatttcctgtgtggttcttttctgtgtttctgtatttaaaaccgatgctcttatatcccctctttcagatatgaataaggtagttatatgattatccggagtaccatcatcataaaaaactccttgatgtttaaataacatattaggagccttttgtattctaggctcaattaatgtcttattaccataataagaagtaaataaatcttgatactcagttccggtgtaaaaatctgttgcctgaggtttttcttcttcacctgatgtcatagagaaaaatgatttaccattataagtcctaatacttgttccttctccatcatcatatttataatttaaagatggtaaaatttcatatagtgaactactatatttataaacactttctgtatcaaacttacccccatctaaaggattggtattaatcattttattttgttcattatcaccataaacacttaaaatgataggactgtttatatcatcatttagaaatcctattaatactacagaaccttcagtaataagaggttttgtaccgaatacgcttccttccggtgttcttcctatgaaagatttaggataaggtacagctaagctaccatcatcacctatacggcttcctagagttaagttgttaactttaacttctactgattgatatttataattaattttactaactgtagctaaaactaatccttttacatttaaatcatctgaatctactctttttaaacttcttcccatggaagattggaatcttactaccattaaatatacacctcttcatcgaatctcataactcttccgttaaattcattccagtaatcatcaagtttatattttcctataggtgtttcatctttagggaatttacctatcatagatataaactccccatcccctacataaatacctatattagtatcacttctaccaaagaataatatatctccaactataaatttactaacatcgactttgtacttatgtcctttaccgaatatagtaaagaatcttccctctgtaaagaagtaattaatattcatagggtatgctaactcttcatcttcacctaaatataaccagtataataagttataagtatctatataaacatctttatctgttccaaatggattctctttaggagcacctttgaacatatactttatatttgataaggatttaagattatcatttaagtctaatgctagtatcgtacttaatggtacatcttcatcaaatacatattcttcttccatatattctccatacaacacatcttgtatctcatcaaagtaatctattaatagttcttgatttctttctactaagtgaactgttaaagtagataaagaatctgtaggtatagaccctttatcaactaaataacttactttcctgaaacttaattctgcctctatatcataaccattattagaaaatgattcatactgcacatgttgagggttaaggctttgtattactccaacgtagggtcgtatatacacaaccttttcatacatatcatctgtagttatttttttaatttcttcatctttttcttttattctttcttttgtaagtacatcaaaattaaatacattgtctataaatttatcaataacatctttagcttctttatctgttgccatagactatcctcctttatttcttatcgtaaatgaattgagcattcttacctatggctgaactcatatctatcgttctagtaccatatccattaggggtagcatagttatgttcagagataaatatttttttacctccatctaatactttctctacaaaagctacgtgaccatattgtgggctacctccttgaactcctctttgccatataacacaagcaccttgtttaggtgttctacctacaccataacctgctcctttagcaccacctatccagtcggcggcgtccccccataaaggcacaggaatgcctaattgccctcttctattgtaagcataccatgtacactgatacttataatgtcggttaccaggttgaacaaaacttgggtcatgtttaggaagtttgccgttatattttttaagtgaatctaaagagccaccatcttgagctccaccactatcagaaccaccatctttacctccactactttgtttctctgctacacctttttctttaagttctttagaagtatcttcacccataagacctcccatgaagtctgatgattgattccatagtcctgcaaatctatgaggactacctttaccgtcttctagaatagcatcttttaaacctctagttactcctacagttgtataatacccttgtttataatcaaatttatgttctacagattcaatatagaactcccacgtatctcctcgttgcttatcctcaataaataatcttttacctaggtcatacttagggtctcctaaaacaataatatctcctgcatagaagttagggttaccatgataccaattaaatagcattctagaaaacataactagagggctatcacttgcatctgagcctgtgtctgtagctacattactaacaccttcaatagctttaagatatttatcaaaagcctcatcattaggtggttctcctttgtatttaatatattcatctaacaaagttgtagcatgtgttttattaccaaaacgatatttagttgtcaattctttaagtgcatctgttttagctttttttctttttttagaattattaaaatcatcttgtgttttaaacttctcttttagtatactctttaatttatcttttgtcaacttcggtctgttatctgatgttaattcatcatctaccttattacctgttatcttttcatattctttttctgttacttttccttctttgacaaacttctctataatttttttagcttgggctttttttaagtttttatattttgaggataatttacttgtatacttatctatgcctttagatatattatctcttccataattacttaaatctttcataattttagagtaagttcctcgttctgtaccattatcatcacctgaagaatctgaatcctcagtagctgaacctgattttgtactaagataaatattttctacttcaaatttggtataaccatatctatcagttaattcaggatggaattgcggtttagaaaatacatcaccgttaagctctttcaacatacctgcaggcgttgctgtaaatatagaatatgtctctacatcacttttacctacatcctcttctataaaatcctcggtaggtactttaatcatatctaaagctctccattcagtaggattaaaaggggtctttcttaatacaagttgagcctttccaggtgttttttctgaatttttgaagaataactcattaaaaggtctagctgttaccatatccattaactgttttaatgacccatcaaaattagtaaaggctgaaacttctgtaagtttttcaaactcatcccaactacttaaatcatcataatcaagatagttatcaattgtattatatgttttttcagtatagttatatttcatataaggtataaatctacgtataataccggtcattacttcatgagctgagctaccagtaaattttacttcattatctccatcaccatcaataagccaacctacttcaggtaatacagcttgaacttcctgaataacacctaatccaaatttcataaaaggttttacaaaagattgacctgttattctaaattgagtttggtcattaccgtaactacctacttttgatacttgagaaaccatacctacctggataagtcgttcttgtcttccttctttatcgttagggtcatcattaggtgtaataaatattcttatgatatcattagccataactagcttatcccaataagtatctcctgccatatttatttggaaaactgaactatcatcttccatagagtttttagtttggaatcctaaaagtttagctccaaactcatcaccattatagtcacgtgtatcttcaaatctcaatgtaaatgtattatcatctgtaacgatttctattcttaccttaggtcttcttattctacgcatatacacatacttccttttattttttatatgtataagagtagtatactatgatactactcttgtgtcaatacaaaattactaataacttctcttatgttcatttgcaaagatatccatgttgctatctaggacttctctaattcttcctccgataatgtctccagtttcttcaggattatttccaccttgaacattaacattgactgttattctgttagttgtagaggcattagaagcatcattagagcctctataattagaaccagtagttaatacaggattactcatagcttcttggtaagtagaggataaagctcctccaccacctccgccaccggagcctccatatttcttcttgaattccttagcattgttaacacgagtacccatcatagcctcgtttgctcccatacgttcaaatccagtagcaaatgcttttgtattctgttctaagcttccacctttgctccaacctgcatttttaagattattgctttcataatcagactgcatctctttccataggtaatctaattgaacatccaagtcactagattttttacctttagatttagcaaagttttctaatcctgtttttctagcccctaaccactgagcaataccaaatgccccactagaagcattcttagcattagggtcaagattagattcttgttgtaagttccccataacagctcctacctgattatcagatagtccttttcctttaaggaacttgtacatcttctctgcaccttctccacctacatcagatgcagagcctccactatcagaaccactatcagaagttcccccatctatattaatacctttagcactctcaataattttctgagctctgtcaagtaaatcactatagattttaagattcttagtttcagattggttattcttttctctaagttgttctgctgtcattttttctttcttcttagtatctcctttaacacctttaacaccttttttcttatctttactatcttcttcggatgcctcagcgtcattatcaaagagacctgttataccgctccatgctttagatataggttttcctaataaagaatcttggaatttattcttaccatccttatctccattagtccatcctaggttccatccttctttagtgttagcttttttagccatgtctccgactttttcaccaacagcccctcctccgaaggaacctatagctccacctattaaagctccaggtattgcacctacaccaccaaataaagctcctatagaagctcctgctgatgcacctgccattcctccgcccatagagcctattcctccgccgatagctttactatctccggaagctaaagcaggtattaatgataaggcagacgtagcaacacctaaaactccggctccttttccaagtccacctgcaagttttccaagtttccctattccacttccacctgcttttggtgattgtgaaaggataccatttttaccgccgtcaccaaacttatcagcaaatttaccatagagacccttagctttgccaccaaaacctttagctttttctcctagattttgtcttctttctttaccaaatatactatcattatagatatctttaagaccactaccagtacctttagctatgtctttagatttatccatggcttttctaccattatctctattaaatacttttctagttcctgaccaggcttctttagatgtttgtttaaatcctttacctttagactccccaccaaacatacctttccatcctgcaccacctactaggaatcctccaagacctttagcgctatcaagtatttttcctccagtagaacgagttcctccacctttaggtgagcctccacccttaggtgaacctccgccactaggcattccacctgccataggattaccgccagagctaccacccttatttctaccaaatttatttctaagtcctttggctcctttaccaattaagtgacctgctccaaattgacttgcagatgcaattagtgaagctgtaaatgctcctatagctcctatagctaaatatataggggcaggaagacctgctaaagcactatgagcatctcttagtggttgagccatatcataagtatcttctgctttatcatcagtcttagatttattttggtcattttttcctgatttagattctttataatcagtggcgttatcttctccttcttttttaccttctttttccattttcttagctttcttagctaactcttctttagatagttttccggattgagcatctttaaatatttcatcagattgctccatagttaagttagcgcctatttctttcatacttctattaaataggtatttttgttctttttcactgccacccatttgagtagccatatcagccatatctgtcaagttttcaggattagatataccttcatccatacgtttttgtaaatcatatccaccttcaagaccttggtattgtgttccccatcccattgctatacgagcataagaactattcataccatttttaagtccttggtctatactgttaatagcattggcaccttgttcaccttgtaatcctttacttcctgactctgcaaaagtagattgcatggcagtaagattactcatttggtctttagttagagttcttccttctcctgattgttccgctatagaacctagtgctttaagttgttcatcttgacgaccaaccatgcctgattgtttaataccacctaggaatgcatcttgcatttccttcatgttatcagaatttactccaccagtatgcatgatttgacccatagactcttgataagcttcttggtctctaatacctaaagagcgtcctccaatagcaagctgtttagtccctgccattgtgtcctcgtcacttttatgccctactgatgcttcatatgaagtagccatttttaacatgtcagtactattataacctaatttgttgtcaattgacaagtctccatatgcatttcttacagaatctatatccatattatcggaattttgacctaatgatgtaaccatcggtctattagtttcacttaatgaggcacccttcatgtataaacctgtagccatagctgtagtacccatcatagcatgagaaccaatagatggcaaacgttcttgaaccattctaccaaatgttcctcgttgttggtctacatctctagattggaaatccttttgaactgaacctttataatactgaactgttttatcaagttctgctcctaatttctcatagttagatataagttcttctctagctttcatttcctgtttaatagaagctaattcttgttcatactgtgccttattaatttgaccgctagctctacgtttagtcaagtcttgttgttggtttctatagttgctatattgctctcttgcttgtcctaaattacgttggttttgttttctttggctctcataagaacttattttacctagttcacttctaactcgtgcaccttggtcatatgtcaatcgtcctgttccttctgaacgctccatgtaacctctagtcatattacgattagctcttaatcgttttgtataatctttagttgcgctagaatctttacttattttattgtattcttcagttacttgatttaaggttttcatttccttaattctattttgaatactagcatcagaacctattttttgtgaagacattttctcaagtttttcttgagtttcatctacaactttacccatcttagcatatgctttttcaacttcagggtcaggtgcaatacctttagatatattctctttttgaaggtcatctaaagctttctttaattcatttatattctttgtagcagattgagtggatttaatagattcatccatgtctttagaagatataacagatttaccatcttgtttatccattgcattctgtacatttttaacttctttagcaattacttttaatttttttaagaaattatctaaaggagcatcaatattcttagactctaaagaatccatataaagttctattgccttcagactattctctaaatccgaactatcaccggacaagaccaatctataatcgtcattcattgccatcattattcaccatccattttaaaaaaataaggatggtagtatcacctaccaccctttacatataccagtcatcatctaggtcttctagtgctttattaacgctatcttgtgatatagtagcatcatcttcactagtcttaccatttcctacttcatcatctaattcttgttgtttctgtctgatgtattccatcatagctagatgttgtgtagtaagcccttctgtttcatcatttaactctgcatcgtttctcttagctctttcttccttatctctatcagataatttagcttccatctgttgtgctaaatcatcggcatctaagaaatcaggtactgggtcaaagtcttcatgagattcattccaccaactactatcatcatcttcaaattgactatcgaattttccacctttttgagcttgtttaagttgtttgttatgttcataaacatctctgttcatattcccaataataaactctatctgataatcatctaagtccttaaatctttgctcagtaggtaaaacattaaactctttcataatagcccatagatttctagataaaggttgtttaacaattgattccataccgcccaatcgttctatatctttatctagtgtttctatactattagtaacgaaaggagtttaagaatcctaaccaatcttcatacataacagttaaaggatataagttataaatatcgtcagggtcttggaattccttaggaacttcaatacctacttcctgtaatgtagctaacatttgatatgctctaattacttggtctgtttggtacatatccataccacctaagtaagcagaacgtaacgcaaatatattaccttgctctcgtgcgttaggtaatttaattttaactttaaatcttaagtctaattcttcaaagttatattctttttcccaagtatcattaacacctttaataactttgttaataacttgttctttttcttgcttgtcttgatattttaatttatctatttcttccggtgtcattttgctaacatcttttttttcttctttagttgtttcttgtacatcttgttcctttttaatttcttctgccataatatgatataccttcctttttttaaatattaataaagcctacgcttatccgattcaatattaatataacacggactagtgtaggcttactactttaaacatagtatatcatattttgtttttaaatcaaaattactttacatattcacctgtacgcttagtaatttcttgtaaactttgttcaattttttcactatttctaagtaggtaaatatagtattcttgtaatgaatcatagtactcataatcaatagttaatatttcttgaccttctaaatattttctagtaatctttcctgcttgttctgttaatgttttgaatttatctaaaatctgattgattgcaattgcagttgatttacttgttacatctacctctttaggaaatttgtgtaattctactttcatttctgtgtaaattgctcttaatttatcttgtgacattttatatcttctcctttaatttgttatacctttattataatttattagttttaatttgtcaatacttttattctaattctagaggaattatatgtaaatccctgttaccattaccatctacatatgttatagcatcttgtaattttctaaaagctttaaaatccatacttgtttcttcttctgtgcttcctcttaagtctattacaatgtatatttccatttgtactcctttttattacatatattttaatgagtaataaatgccatttataattaaaaatgctaaaaattgaatggatgttattatcactaatgcttgactcatagctagtgattcccttgtaactgtaccttttccatttagtatacttactacaataaatataatacttgatagaaagaaataaccatttactattgttaatcccattataactcctccttattgaattgtcaagtctttactataataatttaaatctagtgttctatgtgtatcatctacactgttataccacaccgtaataactctagcatcttcaagactaattgtcaaaaactgatagctaagttttccttctacagttataactttgggatgtttaacaacaattctcctctcaatattaccattataatctgtgttattgtactctatgatattttcgtaggcaaacttatttttaaaaataaaacctattaatttaggtatatttgttgttggtttacctttaactttttttgcactatgtcgtgtaaaattaataattctattttcagtaattgtctcttgtaataactctacacatttctttctttcatacatactcatttgagtataatgttttttaacttgcctatctttattagttgttcttctttctgaccaaaatgtactcatatatccatctcctttttttgttataatatttcattccaatcaaatcttaactctattttaccccctctaagtaaagcaatcttataaggaaataaaaatatacaatcttcaacaaacttcgaataagcaaatgctcttgattctgtttctaatagattcttatctagtttaataatttctacatctgcttctttaatgttaccttcaccataattaatactgtagtttatattacctttatctttgttaatatctgataaacatttatctaatagctctttgttatagtcattacttatataaattctcatattataacatctcctttttttgttatactaataatataccttagttaattataattgtcaagacctttatgtttattttttctagaatattttgttttatcttttttaactttagttaccggattaatattccatgttgctcttgtgttactcatcttacctatcgtttttctcttatttgtcaagataatacttcctttctttttgtaaatcttttttaagttctgttctagattttcttttcattatatctttaaacttacctttagttgttggaaaatcataataatgaaattggttatatccttttagtttagcttgcctattattcatacttattactcctaacctgttattataataacatatcccttgagggagtgtcaagggttatttataattttgtatataatcaataaaacttgtattggctaaaacttcttccttttcttgttctgtagcttctctaatattataccctttaacctgttgtagtttaccgttggcgcaatccgtaattgtagatgcatctgtattaatataattagtcatcatacgcaaaggtaactttaaaacttctattcccttggtagctacatatacttttatccgtttatctgtaatagttttagctatttctgaaaaatcttcgtcttcgtatctccaaagatatcctttacatgtcttcctagaacctataacacaccctcttataccttcagaacctatccattcctgggcttcttttaaattatcaaattttacttcttgtaaagttttaatatttaaccctacaacagatttaaatcttttagttatattccttcttctcattaaccctttaacttcattttctgtcatatcaaattccatctgagtttctttttctgaatgtgttaaatagtattctatgacctcttgttctttttctgtaccaatataaaagtctcttattacatctgtgtattctaaattgacgtttaagaagtcacttatcatatttagtatttcccttttatctagaagtgggtggttaaggtataataattttatattgttttcttcacagtattctttcttagttgcgtctaactcttgtacatactctaatggtttattccaatgccctgttgattgtacaaagtgctgttgtcccatatactcaatagcgtacttcttacctcccatttctatgtagaagtctaacctttgtggtctctttcttcctgtcctaatactcttctctgattgaaaaggtatattattctcttctagtatagtttgtactattctttctccgctactttttaatttaaatcctgtcatatgttccatctccttttattagtatacctttatgttaccatctcattagtattatgtcaagaagaaagaccaacttttattgttggtcttaataagaaatttaagttctagctttatctgcaattatgttacgattaggttcgttattcctaaccttctatatgtttccatatagttcagactatatcactaccctttaagggtaatccccatttccactcacttgagcgtactctccgtagagatagtcgttgcaccttacctataaaaggtcttggctcaggattgcctacatcttaatttgtttagggtttccctgaattagaggatttttcgatacacattactgtgtaaaggcactagttagtttatgctgttaagtagctaaattcaatttcttctgtccgaggtattcaataagggtcgttactccttacccgttctcttatgaactgctatatgtttccatatagactagactatatcacaatcctaacttaataggattcccaccatttccaatcacttgattgtactctccgtagagatagtcgttgcactttcctagtaataaactaggcttagctcaggattgcctacgtcttaaactcgtttaggtgttccctgaattagatgggttttcaataaggattactccttaaggtcgcaattattttacgatttcatttgtctgccaagtttcattgtagttatttgcagagcaaccatgatatgagataataacttgtttcgttaagttatctaccactaaaatatcaatgatatctttcttaagaatttcttcaccaagtgaagcatatcctaaatctgcaaagttttcttttttcatacgtaaacgttctactgtaattgtaccttcataacgtaagtatacgtgttcttgaggcatgatagaaccgatttcgtatacaccagttgtaccgtattcacgttgacctgatgctgattgtgctcttcctaccggtttacctttaatcataagtaggacggtattaccagtatggacggtttgtttagcttctgatgccatctgtattcactctcctaaagtattcaaattatattaataggagtacctaatccaggtactccgtcacctagactaggcttgtaatgtctgttgcttgtaaaccaagctaacagagattttcttgaagcttctgattgggtaaactgtcattgaaattcttgcttcgttaccttcaacaataacttgtacgtcttcagcagggaagtcttgaatttcattatcacgtttcttacgacccaagtaagattggataaagtctttaatgattgaagcacttgtattgatagtacgagtaccaataaattggtcttcaagttgaactttaagctcacttactaagaagtcattagcttccccaacagccatttcagccttaactgggtctgatttatcgttgaatgtagttacgtcatcaacgattctgaagaatgtattagtacggttacgaacaaactctatactaataataccattttcatttaattcatctaagtctattgactcatagatttggtctaatgaacttacacgtagtggtttgaatgtgattgattcaccgatttctaaaccacttgcaagaccacctagagctacggctaccatgtaagcaggtacgtggtttttacgtccatcatccataacaaaagtacctgagttagctactaatgatactcgtggattagataatgatgcttgtctaccgaacaattgttctttagattcattgaatcctccaccaacaatagctctcattggttctcctgcatcagaacgttctttaacaaaagaagctacctctgcatgaactgattgtttagatgataatgggacaatgtagtatccaccttcatgtgcaaatttatctaacttgtctgcccatgtagcaggtggttcaccattagtaccgccttttaacttagttaattcaaaaggctcaatagctttaataggtgaagtagcagttactgtagctgattcttctcctgcttcaacctctacattacttggtacttccccttctgcattaagttgctcgaaagatacgataccattgtaagctgtttgtttttctaagtcaccaaaaactgcttttacatatacagctttatctttaatatttgcattttcaattttatctaatttgctagattctaagttcttatctccaaaaggtgataatttagcttcgaaatcaggtaattgattgatgtctgtaatgatagcattagtgtagtcataagctccgccagttaaatcatatgacttaacttcttggtctccaacttttaatactaaacgacttgctttttgagtttcttcatcatgttctacagagaaagttgcgttagcttcttctcctttgtacttgattgtgaagatattaccgatattatcataaacctcattgaaacggtcatcttggaatattactcttaaacgtaatgaatcacttagtgtattcttttctaatcctacttgaatgttgttagcaacattaccgtagattttagatgttatttttaatccgccaatttccgctgaagcaggtttagcatcttctatacgcatagctaaaatacgtcctgctgtatagttagggttagaaccccatgctaattctattgcatcaagtaattctcctgaacggaataaacgtttagcttgggcatagttacgtaattcataaactgtatttggttctccgccttcagcctgaccgattaagcaaaatactttttcacttgaacctgctgagccaccgatacctgaagtatctacttcaatagatgcatgaggacgggtaataggtcttcttgggaatggttctactgccatatttaattctccttatctgaatgttattatatatctaatttcctacctagatacttctctaatgatggtaagaattcttgctcactaaacaaataatgactaccttccatataagctttaaatcctgctacttgtgaatccctcatattaaaaagggtttttgcagtatcaaggaatgtatctatatgaacataaccattaaatttaggagtgttattttcaggtgtcttttttctagccatcctacttccaatcctttctttctttaaaagttagtttattaatatcttgtgtaatagtataatccaaatctagagaacttgtgtacttaataattgttggtctgccaaaaatcattgagtcaccatcttctattattggtgcaatatcaccaaaagacaaattctgtaattggaatgtttgttgctcttctatactatctctcatagatattaaaatcattttcagtacagcatccaaacatcttgcaacgtctacattaaatgaaagacctacaactgttacttgttcttcaactgtgaatccttttactaaacctttagaatcatttttcttttcggtaaatataatgttagcattatagttctcataatcttcatttgtttgatacttaaatgataccttattaccttcaatctgaagattatcatatttagcaaactctatatcttctacctttattaactctcctattggtttagaaacagtaaaaactaacttatcatcttctcttattgctgtagaagattcgactaaggtatctcctgttgcctcaaagtaagatgactgaatactccctaaagagttttttgtctcttgtccttgacctaattgtatcaagtaatgagcttcatagttatttttaaattttgggaagttaaatcctaccgttacttcatgttgtgcattcttaccacagaaagcttctttaaagctctctctagtttgataatcaaagtcttttaaaacttcatctataatataacaattctctagcacagtgttaagtctaggctttatttctgataataaatatgaatcaactgatgttattgccatttaatactaaccctcctcttaatttaaatttttcatcttccagttcattaattgcttaacagtttttagagttgttttagagaagttatcttcattaactttatctctgttaagtatccaagaactagcaggtgacttactagaaacagttctaaatataaagtaagaagattgctttcctcttttaactttagtcatattatgagacataggctcaggcttcattgaaggatggcttacattctttctacgtccttctaggtaatcagttatcttagagactgaacctgttcctttatctacttttaaagttctcatatcttggtaagtactgttattcattctactagttttgatgcggattggtacagttaaataccatccaccatctttactagttttctttttagatgagtgagcaaaagcttttttaaggtctactactccttctttttcaagctttttctctgttatttgtaggtaagtaggcatacgtttaatactagtattctctacttgctgtgctgttgcttgtaatttatcaagaacttctgaacgcataccatcaattgttctcttacctacctgcttatagtttttatttttaaataaattaggtctctttccgtgaactggcattatttaaatgcacctccgaagaatccacctaaattactagggttagatgccgaagccttagggtcatctacttgaatttctaggtcttcttctataccatcattaactttataagggtcttgtagtacaataacatcttcccttttaagaagtaatttttgaggtaagttttcaaattttgatttaggttgattaaacttagtatattggtaacgactttcttttagtatatctgatactacatatcttaaagtcataagtatctttaaagttactgtatgattctcatatttttcatttaaatacaatctattattcttaatttcataatcttcttcatagactgtaccatcttgagtggctatataagttacttcttttacatcgtagtatagaggtataccttttctaattctatctttattcacaaaataaatcatttgttgaggcatcaatacctcaggaacagtaaacctgtctctataggaaatcctcttttctaattgagtggtacctattgcagttcctgtatctagtatacctatatctaactggttagttcctttctcttgagactgtattgccattatagtctctttaggaggtagatatgcaatccctttaccatgacatctagggcaatcgactctaggatgtcctgtatcaggattaaggcaaggacagaaatatgcttcttcccataatacttttatacctcggtcattaataaacctaatcatgtcaatcgtatcaaactctagtctagtagtatacttaggtttatcttgttcatctacttgtgttgtagtagtatatgttgttgacttattaataacattagggttagagttggctcctatcatatacggtttttccattttctaaccctccttataatcctatcatattatatccaaagtaagctcttaaaccatctaatagttcttttatatcttcatttatttgaagtatctgtgcactagctccaccatacatagctgattgagtggtacctattgtctctgtaataccgtctacttctaatgttttattagcaataccggcaccaatgattaagttaccccatacttggtatatttctttcaatgcatattttataactaactgttctaactcaggaggcatttcccaaggtttatttcttcctgcttttttacgtggaagcatacctgatacatattctaatcgtatcatttgaggtgcaaatgttgcccctgatggcgggtatacacctgctaattgagggtatccattaaataccgcatcatatgacattgattgtcctgtttgcataagtgctgtagggaataattgaacatgtcctgctagatgctctactttccaccagttagcagggtatttatatatcggtctaccattaaactgtagctgtaagttctctacctgtaatataggttttctgtaagcatgtacaaacatataactattaaactctgtctcatgataatctctcatctcatgttgagtgtcaggtagtatagatatatctaatgctctttcagctttacctaccgctctttctaatatatggttataaaactcatcacccataggctgtcctgtatcaggattttgaactacaataccgaacatatatgctttaactgcatccggtgaccatccataatcagctaatgttaaattatctatctcacttacgtctatatgtttaggattaccactaggatgataaggatattcatagtttaatgatttttcataagggtctaagtcccctccaaacattgagttaaccatttaattcaccctttacttattttcatcttttttggctgttgttttacgtgctgtagattttctagtagtacttgtagtttttctagtagtacttgtagtttttctagtagaggctttcttttcctcttccttaggctcttcttctttactagtagaagctgattgttttctagtagttttcttttcttcttcaaattcaaaacctggaacatttgcaaattctttttcttgttctttagttaaccctttaactactccatctttgtcaatctccactgtaccataaacagtagccatttttttatctaatagtttcttatagtataacatatttattaaatcccttcaagtttattttaataaaaaagggataaaccctaagtttatccctattctcttgtattcagtttttcttattctattaaactgcgatataacgaacgtttttaatacgagcccattttttaggagcacgtaatgctaatgcaccataccataatactgcaaatgtaatagaagcattaatttgagctaatggtaatttcatcattggaagtaattcgaataagtgaactacttgtggtgacatttcaccaacaaatacgtctgctgtttcaggcaatgtttcgttcttatctacgaatacgattgttccgtcttcttgtgcatctttaactggtacacgtttgattaggaagtacatacctgtttctttaccttgacggtagatagaaacgaattgtggttgttgttggtacatagcgttaacactaattgaaagtttaacaccgtcgtctacgttagatactgtagctgttacttcttcagaaggagctgattgagcgtcatctgagttaactactactttatatgataatcctgcacggtcttcttcattttcaaaagcacctttttgcttagtttcaacagtagctgtaactttagcaggttgtggagcatttggtaatggttgtaatgattcatctaagattaattcattttccatcactgtagaaccgtgtaatttaatgaatccacgagatgagtagaaaccatttacgctgtaaccagtgttaacgttaccgctgttgtcttgcattaattgcatttgacgacctaagattgagttaacgaagtctgcgtgtacaccgataggcatgtaagcatctgtagctgtaccgaatcctttaccgatacgtaccgccgcctcatttaagtgtttctcagttaattggttacctttagcgttaattacgttatttttgtcaatcaatttagctaaaccatcaaactctaaaccttcaccttcaacttcagaagttaatgaagcgtcaccgtagaatgaagcccactcaattgtttttgcaacaactgcgatagcatcttctgtaaggatttgtgatgggtcagcaatgttatttactaaacctgatgcaattgacatgtttttagtatcagaaacgtatttcattgatacagttttttgacggatatttgggtcagatactggtgctactccgatttctttaacgaaacgagagtgacctacgttaccatgacgtaaatattggtcgtattttactactgtagattgagcaggacggcgtgagatatcacgatagaagattaaatcttcattagtccatgttaacattgtgatttggtcatctaaaatttctctacgtaaagctcctgcgtcaatttgtgtatcaggagtgattccataaccagtttggaatgactttactacgtcttcttggaattggtcagcgtacttttgttgaacgtctgacaggttcttttcgatagtcatataaatttatcacctttcatttgtgttctttttattttatgtagggtacagtaaaatgtaccctatttatattctttagttacaccgtataatataacacaactttgtgcattaattaaatttgtgcaaagtcttttacagttttaatatctttctctgatgcgttagtagggtcagtgttaatgttcaagtaagattggtaagctgattgtaagtcatgtttagaagctctagggtctttagcttgtgctttgtaagaatccatgaacttagttcgttcttcttgacttaatcctttaaatgtgttatcttcttgtacttcttcagcttcttctgattttgcttcaccagtttcagcttgttcttcagtgtctactgatttagaaacataaccttctactttttcttgctctccatttgtagatgttactgatttttctacagcttcttcatcagtgtctactgatttagaaacatcttcagcttggatttcagaaatttttgctgataactcattaatagatttactaacttcacttaaatcttctttagtagcaaagttttctttctctttatttaagttttcaaaagatgttaagatagatttaaatactgttgtgatatcttcatcagaaattgatttagaagttttttccttcttatcttctttcttatctttatcatcgtcagtatctttatcttcatcgtcagaatcagaatcttcttttttatcttttttatttttacgtttctcgttgtctttattttctgtcttagtatctttttggtctacagggtcttttgattctttagctgatttttcaacttcctcatcttcattgtcctctgctacctcttcagattcaactttttcaccttgctcttgtgcttctttagaatcttcctcagatactttttcaggttctttagcaggttcttcagttgtttctgctacttgctcttcggtagattctactgtattcttttcatcatcttctacagatttcgaaactgcctcttgagcatttaacttatcatactcttctaaaatattttgcatttctttactcatagaatgtattctccttacctattctagtttttgtttgtttatatccattactgctagttctgcatctttacgagataaacctttagctagttgtaacgtaaggactgattcctcatatcccatactattagatttactcaaatcttcaacaacgccattccatacatcattaaactcttttaaatctttaatcttagtgacgtaagctaaatttgtaatgctagatgctatttcttcttttcttaaagctcctgcatcaacttgagtgtcaggtgatgtaccgtgaccagttaaaaatgatttcataaagctttcccatgttgcttcaggattagcagggtttttaactaatgcaactcctgttatcataacctcatcaataactctattgtcatttatattacgttttttaactgcaccttcaatagaaaaacctaaacgtcttccactacctgatttttctaatttctcagctaaatcaagcatcttaacaacattttcgtcattcttccatagctttgcttcaataaataaacctttttctatatccacatagcaattctctgtaggtatacctacaactttatcactttgatgctcataattaatgtacccttgtgacttaaaatactctatatctattcctttaggattaactatatcattctgtaaatccatacttggagtactagcccatcctgaaacaatagaatactcattagtatcagaagctgttgatacagatttcttcaaatccataggtacaaaagcattaaattttatttcttccaaaggtgtctacacctccacttgttattttatttacttttacgttaataatataacaataataacttgtaagtgaaatattaatattttttatgtattaatatcaattacatatagtatatcatagttattacatttatcaaaattaaattacaaaaaaaaataaacaaagcctagatttattctaggcttattaattaatgtttaaagtcagaagatttttctccttttcttccttgacctttattagatgtttgagtacgataaacattatcgtcaccttttatttgtgcatctgttcctatctctttatcatcattactagaatctgttgattgtccttcttcagaatcatcattgtctccttctagtaaactcatcatcatttgtaaacgttctttttgtttaccatcattatattgtttatcttgttgtaattgtgctgttccttgtaagaatgaagcatctagaataatgtctccaccttcaataggtttcttaccttgctcttctctagcctcattaactgttttaaatatttgagtttctagtttaaggatattaagtttatcagtagcactcttagtatctccacctacgaattggaatgtatacttatctccatattctgatataatatgtctattaactaagtcttcaataaatctaagtaaaggttgtaaacctttattttgagattgttgttgttttttacctgggtcagcctcatttaaagtagaaccacctttagaacctgtagctcctcctctattagggaaaccaatttctgcagggtcaataccatataaagcagatataatattgataaggtaatttaaccatttctcaaattgcatatcattagcagtaggtgtcatatttacaaatttaatatcatctgccattaccactggaatttgccatgaaccattaatacctgataaactagatttccattcacgcttaaagttctctaatgcatgttgtgattgttgttggtctgaacgtatctgtaaaatacctctagtagttccaccgtgggagaagaatctatcattaaatgattccgtgttattgtaggcaataaactctttcatagctatctctacttctgataatccatatcctgaagaagataattcagttctagggtttcttatacccatagctaactctctagaagtaaaactagctactactcttttatctactacttgaacaaatctcttaccacccttaataattttaccttttttatctgttgcataaaaaatagtagaagggtctactgctatgaatttttctaatctagtcttattattcttattaaatactttttcaaagttaacttggtcatagatataagtatctctaacaattttcttacagaaagtttgaaatgaatctctatctacatctttatctttaccagtattaacaataaaatcttctatacgtttcatttcttctttttcttttctaccaggttccgcatctaggtctcttaatcttacctcaaaacctaaacctttctctgaatatcttgcaggttgacaatacatagctacttgatttgaacgtgtaagtatgatagcattaaggatagggttattaccaaactttttcaaaacatcatgtaagttatgttcgtttttcatgtaacttctcttatctctaaattcaggattagtatccatcatttctataaatggctctgcataagcctgttgctgtccgtataaagacttagttaaatcttgatactctttattgtcttgttctatttttttaatgttagcttgtaatccttcatcaataggaacttgagcaatggtactattattaccatagtctttacctaatctgaattgcttaaataaatctgccaattactagtcacctctactccctcttactgtagttaatacaacagtattattataagttacatctctaatatgttgagggatatttattttaacctcaaatggttcttcaatgtaataaaacatcttcttactttccataacaatatcataatcttctaatagtatattattatctttatctactaatattactttattgtcttttgttgcttctagaatcatgtattttactttgtttaaagcaataaaaacagctacgtgttttccacctatctgtctataataatctacaatctctatccaattatcttgcataccttgacctttgatgaaatcttttgcttcatcccattttttatctttagagaatatcaacctattcaccgtcttttttattttttatctttaaagttactttttttaataattttcatcatcttgtaccaaattcctccaagtattgcacctataaaacttatagtaaatataattatagggtcattgaatccaatataatgttcagtattttctatggaatctattacatcattcttaataagtacagatgttgtttgaaacatagttaaaactatgtatgtacctattcctattatagcataaattacatacaaaacaaaaacgtttttactagagaacttactatgaacaaaaatcattaaagttaaaagacttaaacaggtaaatactactgatagtgacgttataatattcattcctaacaaagttttcaccaccgtaatgttcaatttttttatatttagctcttatttaatatagcaaacaaaaaagaggagtaattactcctcttcagttttatcttcattatctatgttgttatcgtccggttgttcagtgggctgtttatcatctacagtatcttcatttttatcatcttcgtccactttatcgtccggctctgagggtgactcaggttcagttggttcagtttcccatcctccattttcatcaggattgtcagatggttcggatggtttttcttcattaccttcatcaggattttcattcggttgttcaggttcaggttcaggttcaggagtaacttctccaccattatcccctgtattaccattatctgaaggctcttctcctgggtcaggtttttcttcccaatctcctcctccggtgttaccattatccgaaggttcttccgttgatggtggctcataatttcctccaccaccggagcctcttccaccgtcttcatctgtgtatcctggaggcggtgggtttggattatctgtatttccttgattattatctactggattctcaggaaataccggaactgaaggattatcaataagaggtataacatctgagggtatagttggttcaaccggatttgttataataggattatccgttggtaagtcaatagaaggttttgtatcttctactatgctatctactgtatttggataaacattatcgttaataacacttaaaccatctatactatttgaatcaggtgataggaaaggagaacctaatacactagtaataatagaacctactgtttgtttttcatacccgctatctacagggacagttatcgtacctattccatcttcactaataagtatttcaggcttgtctactttatcactaaactcaatattattttttactaatattaagtcatcatcaccagttacatcatatattttctctctagtttctttatcttctttttgtctttctttatttgacttcttattataatctttataatttgtttctttttttacttttttaagttcttcttcagccttatttaatcttttaacatatttctttttagtctcaccatcattatcatctgcttttttataaatctctactaatctttgatatctatctttatcttctttagcatcttgatatttattaaaaaatatggtcataatgactacaaatactgctatcataaccgttattatggttatgattacctcattgccttgtggtttctttttcaattatgataccctcattttatatagtctcataattcttcccttttataagttattaagtttctcttcttcttcttttctaattcgttctttttcttcaaagtcttttctaagcataaatgaaatacttccttggaactcattgcctgaaaggatgttacttaatgctgtatctataatagctacatcacctaactcaattgctttacctgcttctacatcttttctaaattgcttattagcttcgaaaatatcaatgcgttttgaaaaagcaagtttatacatcttatcatgtaaatctcctgttaaagggtcatttaatctactttgaaagaccattaaagagccatctagacgttgagtttcatccatagggtcttgtctaaatacattataagacttgtatagtctatttaccatttcacataataaactactaaattctttaatactatcttctttctcctctttactaagtggagttattgattcttctaatgttaatttattttcttctaaagtcatttatttcttccttccttttttatcttaccttcaatatcttcctgtaatatttttaataattcagttgtgttatctattctactcatattagactttatataaattgtttttaatacaatatataaaataaatacaatagaatagatgactatagtgctaaataaaatcactataatcacctaagaattgttttacatctttttttcttaaaatgtatccatctttattaggtttaaatcctaaagtttttaaatactctactgcttcaggtaattctatgtcatacacaactgcatttttattttccttaatacttaaacgcaataattccataatagctcttgctcctacaccatctgaatcaggtgaacttgcataagattctaatattatatcattttcagttcgtttaaaagatgtaattcctaaggtatcaccattatcatcaacaaactctttatacaatgatgagtttgtattaatatgtgatacatctacaccttttttacttaaactagataatgaatttgctacttttttagggtttacctttccttcttcaccattagaaatagctcttgctcctactacacttctactaacttcttcttttccttcttgtttttctttactatcgttctctttattaccatcttcgtaaactgtcatttccatttctttaccattacgaataacagtacgtttaaccttatttagtccaccaagatttttatctccacctttatggactatttcaggctctctattagcatataaaaaacaatcaaagaaattatcgaatcctagagacttataaacatgttcatatttaacatctaaagtatcactatttttagaaacataatctaaggataattcctcacccaataacaaattcaatacacttttattaatttcttcattactaattgtaccataaaataatttatctgtcaagtctatttcacctctattcatcaaagtagaattgtttatttccttcttgattgtaatcagtagaaacaaatgtagaaccaaagcttgtaccgtttccttctttaagaagttcttttattcttgttaatcctatataggcgtagacacttgcttgtgcatagtggtcgtcacctttacgtttgataacttggtacatttctccagttttttcatcttcttcatccataataacaacattctgccaatgttttaagaaagtttttaaatcatcatctactgtactataaacacttatatcctttgtcttaagtgcttgtacatatcttttattctgcattaatttatccactgtaaccctattattgttctcattaaattcaggtcttaattgccctgtagatttaggagaagatttataggtacatccaaatactttatcttttccaaaatgattaatgagttttaaaacattattacctgagtccccgttatctgcaattataatatcagggtcgtacttagatatttcccaaattattttttctaaatctgcttcaactaaatcaggtcttgtcatttttttaacagagaataatcgtattaagtctaccttaccattaggtaacataccatgaacagttatccagtgagtatttccccaatctataccaatagctatatgagaatatctatctcgtttcattaattgtgtttctgcaataggtgatttgttaccataaacatcttcttcattaactctaagtttaacatcttcaaaaggataacctaaaatatagttgtagaatgcttgcttagattctgtattcatttctttctcttttaattcatcagcagaaatccatacagcgttcatttgtgttattaggtatcctcgtacccctttattaccttttgtacgctcagggtacttacaatgccactcaccattataccatctatctagtggtttaccacatttttgacaaacaaattggtaactaccattttgtactgttttagcttgctcatctaccccttcaggattaacacataacatatttccactttcttcaagattatcagggttgtaatcattataactcatttcatttaagtaatcacaatgttgacatctatgaccgtaataccattggtctgattgttggtataatttgtgtatacccatccctggcacagaaggtgtgctccatcttcttacaatcttaaaaggtgatgaagacattgattctagtgcagacgattctgctaataagtttaccctgtcatactcatctaaagataaataatcaatatctacaccctctacggtacttgctttagaacttgttctaaagaataaactagagtttcttatctttttaaaacctaacgagtctttatcccaatcaacaatgtctctaaaatattctttctctaaaacagggttcaaacgtgactgaacaaattttttcatttgttcatttgtagggaatgtatacagacactttgcgttagcataactatgcatatctgcaaaatgaaccatttccattacacccatttcactaagacctaactgacgtgattttattacagccttattaggatgagtatcatttacaatcctagtttgccaaggtctatgagcctgtgctttacttctatccctgttaggaatactaaaagttataggatgacctctcagtgtatgatacttaagcatataggtagaagggtttagcatattgattatatggtctatctgttctcttgttattttttcagtttgaaatgtttcttgtgctatcttaattagttcttttccatccatttatatctttctccttagaatgtttctgaattttcctcattcattactttttccttttcagaaatcattgctgtaatatcttctgctgacatttctgatatcttctgtaaatcaactgtagattctccattactatcttctgttgtaatctcatcaaataattcctgttgaggtctagatagttgaggtattgctcctccttcagaagtttcattgaccatattttgcatttgagagaatatcacaaataatttgtataaatcattcgggtctttaacttctatttctttattatctactttcttattgaattcgtacattaatttaccgataccattcataaatccatcagctatatattttcttgtatcctcttcttctaactttttcttgttaattatatctctaatattttctgcactcaatccatttcacctcgttttcttaaatttttataacaattgttgatatctgcgcaaatatcaaaataaatatacttagaatactgtaaatgaaaatgattaacttttgataatgcttttcctttagtgtaattcatacctgataactgctgaccacatagactacaaattctactagggctagctattctcttatctcctttttttactaaagaaacagatgtagcaccatccttaagctctttcctttgttctttaatttctttctttgttttcatcgtaatcttcctttttactatcttcctctattcttctttgtgctttagccctaacttttatctcttctgctgttattccgtaattactttctatgattttcttgattattcttatttctttatcatttatctctacttttttaagaacatattcaggtagggggtcttctttcttcagtaagaacttatctgttacagtaagtgcgacattagaaacaataccaccaaagataaagtatgtcataactacactcggtcttattgagtaaataagggacaaggaattaataacagacaaaattagtagtaagaatataatgataaccagtgttttgaatatgaatatagctatgttattattcaaccactttaacctcctattgtctttttttattatattattaatctaacaattgacttttatgactggcttttaatgttatattagtggtgtaatctaaaagttctagaaataataggtcaaaaagaaataggtgtttaacaatgattatcgtatctttttttctgtctatacctcttttttgtttctattattttatacttagtggtgttacaacgtctttaggttattctatctatagaaaagataaaagtaaggtaactcttaatatagtatatctatcagctatctatgctttatctgtttttagtatttggcttattttctcagaaaaaataattattatcattattcttaatataattataataactgcctttatcataactattataccacaaaataagtaaatttaaaaattaatagtaaggaggttaccactttgactaaatataaggatatccttaagttagagtttaaagatgcactagcccattttaaaagagacagacgctatttccacgtctatagaatagacagagtattaataaatggctcaattatatacttcgactattattaccttccttctgatgaccctaatattgtaataaaagaattagacctccaaagttttggtaagcttaggttcgaaattgatacaaaaacatcttacggaaaagtcgttacggataattatatggagattatcaatgatttcttagaaaattatgatatccattctgaatctgaaacggttagaccttagaggtgattctagttggataaggagataaacaaccttgtttctcaagtagaaactattaagtctaagatacaagaaggtaattatatagatagagggactttcaaagatttagaagttgaggtagctgaactaagaaaaatgatagttagtatagataaagatgtagctgtcaatagtgaaaaacaatcagcaatttacgtccaattagaaagacttgatgaaaagatttcagaacttgctgaaagtacaaaaactaaggatactaagaaaaaggatacaactgagaaggttcttttacttgttctaggagctatattatcctttgtctttaacaaatttgcataggagagattgtagatgtcaaaacatattgaaataacaatgtcaagtggagctaaatactttttagtatctactgatgaaaagagttacaataggcaagatatagattatatgttaagaggaatggatgaaacctctataaaagtatatactgaaagtgctataacttcacctcaagtatatattaatccaaacagaatagaatcttttaaaatagtattctaattattgagtgactttaagtagtcacttttttatttatgctattgttgactttctaacattgttaattataattatatatttaaatagtaattaataatagtaataaatatatataactataataggagagctccttattttctaaatacgtactttttctct

1. A composition comprising at least two different strains of isolated bacteriophages, each capable of (lytically) infecting a bacteria of the species Staphylococcus aureus (e.g., Staphylococcus aureus present in an Atopic Dermatitis (AD) patient), wherein at least one of said at least two different strains of isolated bacteriophages has (i) a genomic nucleic acid sequence at least 90% (e.g., at least 91%, 92%, 93%, 94%, 95%, 96%, 97%, 98%, 99%, 99.2%, 99.4%, 99.6%, 99.8%, 99.9% or 100%) identical (e.g., in the combined coding region) to one of the nucleic acid sequence as set forth in SEQ ID NOs: 1-7, and/or (ii) at least 90% (e.g., at least 91%, 92%, 93%, 94%, 95%, 96%, 97%, 98%, 99%, 99.2%, 99.4%, 99.6%, 99.8%, 99.9% or 100%) identical genes (e.g., in the combined region) to the essential genes of a bacteriophage selected from the bacteriophages listed in Table 2, as set forth in Example 7; and
wherein optionally, said at least two different strains of isolated bacteriophages have synergistic redundancy effect, based on either (i) time-to-mutant (TTM) that is at least 10%, 20%, 30%, 40%, 50%, 60%, 70%, or 80% above the longest individual phage TTM with respect to said bacteria, or (ii) normalized area under the curve for OD600-time plot (AUC) that is at least 10%, 20%, 30%, 40%, 50%, 60%, 70%, 80% or 90% smaller than the smallest individual phage normalized area under the curve with respect to said bacteria (or a mixture of more than one of said bacteria).

2. The composition of claim 1, wherein a first of said at least two different strains of isolated bacteriophages has a genomic nucleic acid sequence at least 90% (e.g., at least 91%, 92%, 93%, 94%, 95%, 96%, 97%, 98%, 99%, 99.2%, 99.4%, 99.6%, 99.8%, 99.9% or 100%) identical (e.g., in the combined coding region) to the nucleic acid sequence as set forth in SEQ ID NO: 1, and a second of said at least two different strains of isolated bacteriophages has a genomic nucleic acid sequence at least 90% (e.g., at least 91%, 92%, 93%, 94%, 95%, 96%, 97%, 98%, 99%, 99.2%, 99.4%, 99.6%, 99.8%, 99.9% or 100%) identical (e.g., in the combined coding region) to the nucleic acid sequence as set forth in SEQ ID NO: 7.

3. The composition of claim 2, comprising at least three different strains of isolated bacteriophages, wherein a third of said at least three different strains of isolated bacteriophages has a genomic nucleic acid sequence at least 90% (e.g., at least 91%, 92%, 93%, 94%, 95%, 96%, 97%, 98%, 99%, 99.2%, 99.4%, 99.6%, 99.8%, 99.9% or 100%) identical (e.g., in the combined coding region) to the nucleic acid sequence as set forth in SEQ ID NO: 5.

4. The composition of claim 1, comprising:
(i) a bacteriophage having a genomic nucleic acid sequence at least 90% (e.g., at least 91%, 92%, 93%, 94%, 95%, 96%, 97%, 98%, 99%, 99.2%, 99.4%, 99.6%, 99.8%, 99.9% or 100%) identical (e.g., in the combined coding region) to SEQ ID NO: 1;
(ii) a bacteriophage having a genomic nucleic acid sequence at least 90% (e.g., at least 91%, 92%, 93%, 94%, 95%, 96%, 97%, 98%, 99%, 99.2%, 99.4%, 99.6%, 99.8%, 99.9% or 100%) identical (e.g., in the combined coding region) to SEQ ID NO: 7;
(iii) a bacteriophage having a genomic nucleic acid sequence at least 90% (e.g., at least 91%, 92%, 93%, 94%, 95%, 96%, 97%, 98%, 99%, 99.2%, 99.4%, 99.6%, 99.8%, 99.9% or 100%) identical (e.g., in the combined coding region) to SEQ ID NO: 5; and,
(iv) a bacteriophage having a genomic nucleic acid sequence at least 90% (e.g., at least 91%, 92%, 93%, 94%, 95%, 96%, 97%, 98%, 99%, 99.2%, 99.4%, 99.6%, 99.8%, 99.9% or 100%) identical (e.g., in the combined coding region) to SEQ ID NO: 4.

5. The composition of claim 1, wherein said at least two different strains of isolated bacteriophages in combination target (a) at least 80, 85, 90, 95, 100 or 110 different strains of Staphylococcus aureus from the list of about 120 bacterial isolates from injured human skin in Example 1 (“the list in Example 1”); and/or (b) one or more of the Staphylococcus aureus stains in Table 6.

6. The composition of claim 1, wherein at least 100 different strains of Staphylococcus aureus from the list in Example 1 and Table 6, and/or at least 25 different MLSTs of Staphylococcus aureus from the list in FIG. 3 are targeted by each of said at least two different strains.

7. The composition of claim 1, comprising at least three different strains of isolated bacteriophages, each capable of infecting a bacteria of the species Staphylococcus aureus, wherein each of said at least three different strains of isolated bacteriophages has a genomic nucleic acid sequence at least 90% (e.g., at least 91%, 92%, 93%, 94%, 95%, 96%, 97%, 98%, 99%, 99.2%, 99.4%, 99.6%, 99.8%, 99.9% or 100%) identical (e.g., in the combined coding region) to one of the nucleic acid sequence as set forth in SEQ ID NOs: 1-7, wherein said at least three different strains of isolated bacteriophages in combination target (i) at least 100 different strains of Staphylococcus aureus from the list in Example 1 and Table 6; and/or (ii) at least 25 different MLSTs of Staphylococcus aureus from the list in FIG. 3.

8. The composition of claim 1, comprising at least three different strains of isolated bacteriophages, each capable of infecting a bacteria of the species Staphylococcus aureus, wherein each of said at least three different strains of isolated bacteriophages has a genomic nucleic acid sequence at least 90% (e.g., at least 91%, 92%, 93%, 94%, 95%, 96%, 97%, 98%, 99%, 99.2%, 99.4%, 99.6%, 99.8%, 99.9% or 100%) identical (e.g., in the combined coding region) to one of the nucleic acid sequence as set forth in SEQ ID NOs: 1-7, wherein (i) at least 40 different strains of Staphylococcus aureus from the list in Example 1 and Table 6, and/or (ii) at least 52 different MLSTs of Staphylococcus aureus from the list in FIG. 3 are targeted by at least two of said at least three different strains.

9. The composition of claim 1, wherein at least one bacteriophage of said at least two different strains of isolated bacteriophages is genetically modified such that a transposable element (TE) thereof is inactive; optionally, said TE is inactivated by a mutation (e.g., deletion) that inactivates (a) a transposase of the TE, and/or (b) a structural element of the TE required for transposition.

10. The composition of claim 9, wherein said transposable element is any one listed in Table 7.

11. The composition of claim 1, comprising no more than 10 different bacteriophage strains.

12. The composition of claim 1, being formulated for topical delivery, rectal delivery or delivery by oral delivery.

13. A recombinant bacteriophage capable of infecting bacteria of the species Staphylococcus aureus, wherein said bacteriophage has a genomic nucleic acid sequence at least 90% (e.g., at least 91%, 92%, 93%, 94%, 95%, 96%, 97%, 98%, 99%, 99.2%, 99.4%, 99.6%, 99.8%, 99.9% or 100%) identical (e.g., in the combined coding region) to one of the nucleic acid sequences as set forth in SEQ ID NOs: 1-7, and wherein said bacteriophage is genetically modified such that the genome thereof comprises a heterologous sequence; and/or lacks a native transposon sequence present in said bacteriophage prior to said bacteriophage is genetically modified.

14. The recombinant bacteriophage of claim 13, wherein said heterologous sequence encodes a therapeutic agent or a diagnostic agent.

15. The recombinant bacteriophage of claim 14, wherein said therapeutic agent comprises an immune modulating agent.

16. A pharmaceutical composition comprising the recombinant bacteriophage of claim 13 as the active agent, and a pharmaceutical carrier.

17. The pharmaceutical composition of claim 16, being formulated for topical delivery, rectal delivery or delivery by oral delivery.

18. An isolated bacteriophage capable of (lytically) infecting bacteria of the species Staphylococcus aureus (e.g., Staphylococcus aureus present in an Atopic Dermatitis patient), wherein said bacteriophage has a genomic nucleic acid sequence at least 95% (e.g., at least 95%, 96%, 97%, 98%, 99%, 99.2%, 99.4%, 99.6%, 99.8%, 99.9% or 100%) identical (e.g., in the combined coding region) to one of the nucleic acid sequences as set forth in SEQ ID NOs: 1-7.

19. A method of treating a disease associated with a Staphylococcus aureus infection in a subject in need thereof (e.g., a subject having Atopic Dermatitis), comprising administering to the subject a therapeutically effective amount of a composition comprising at least one isolated bacteriophage strain capable of infecting bacteria of the species Staphylococcus aureus causing the infection, wherein said at least one bacteriophage strain has a genomic nucleic acid sequence at least 95% (e.g., at least 95%, 96%, 97%, 98%, 99%, 99.2%, 99.4%, 99.6%, 99.8%, 99.9% or 100%) identical (e.g., in the combined coding region) to one of the nucleic acid sequences set forth in SEQ ID NOs: 1-7, thereby treating the disease associated with a Staphylococcus aureus infection.

20. A method of treating a disease (e.g., Atopic Dermatitis) associated with a Staphylococcus aureus infection in a subject in need thereof, comprising administering to the subject a therapeutically effective amount of the composition of claim 1, thereby treating the disease associated with a Staphylococcus aureus infection.

21-27. (canceled)
